United States Patent Application Publication US 2007/0083945 A1 - sequence listing, part 44

SEQ ID NO: 299028 - DNA, 445 bp, Glycine max
  unsure (1)..(445): unsure at all n locations
gtgagttttttctttttgattcgacacnatnatgtttcgcgcaacannccnnnaccggaggatgcaacaaggtgctacattctnaacncccggaccngggggnncggaaagaggggaaacaccccgggagaaaacgnncccccccacccnngaaaggacgacaggggagcacgccaggcagctgccggaccgcgagaagggggcacnaccacgccacccccccgaagggaagcggacagcgaacgagaacccaccaaacgagaccaagcggccgagacgcancaaaaacaaccaaaacacaaaaaccgcaaacgcanaggagactgggcagccangcacgacaggcacgcaagcaagcgccgaagaggggcacagggccgccccgaccaaccccaagcgaaccacccaagaccggaagaaagcccaagaacccacccgcgaacgc

SEQ ID NO: 299029 - DNA, 464 bp, Glycine max
  unsure (1)..(464): unsure at all n locations
aggatttcttgcctangatnctnannantcaagacccgcgagcgntaagaggccggatgctgcaagcangattgtgatatcaaaaganacaaccggcgccgcggcttgatcttataagaggcaagcatctatccttcaaacctgtgctcaccataatcgataacctacaactcctgcgacaaacttgatgaatgcttggatcatccacctttctaaaaaatgcatgctccaaccactgtcatttcccaagaaaagtgttatgttcaaaaacccgtgcatataatcgcttcatcctctactgcctatgcgaaagcttaaaagaactaaccacctgaatcctttgtggctctctcacccttgccgaagaagagcgacaaccgcctgatgctttgtgactctctcctacaaagatcgaagactactgctgagatcttagaacatcctaccctaaacaagaccaaggg

SEQ ID NO: 299030 - DNA, 566 bp, Glycine max
  unsure (1)..(566): unsure at all n locations
ngggatcttacccggaattcgacgnacnnatncatancgancnaaanaattttctncnccgngngagtagccctcgaggtggagncngcgctggatagcatngcatgcaattggatganttttnnnnaagganagaacctcccggctgtgtattgtgtaaccacacaagtggataccctgnnagatattgtccccggggtgtcaaggaaaacccttgnggacgatcaagttgtggcgctatttgcccnatacccagcctgaccaatcccaaccaaccccggcataatcagtcatttgagaacctgtaatgtacctaagcaggcgatgctctggcagtcaacagatggaaaggaaaacaaaaaccaccaaactatgggaggcttgttggtgggctggcccaactgtgaattctcgtgaattatagtggatggtagccctctggtaatcnattacctaagggctgggtaatcgattacaaagcctaaaaatgaaaacaggaggctatgattgtctctggaatccaataccacgggtgtatctattaccaggcttggaaacaagtcacn

SEQ ID NO: 299031 - DNA, 490 bp, Glycine max
  unsure (1)..(490): unsure at all n locations
cggaatttttagttcttagtatcttgcaccnctnatnacacagcagcctctcgaagcgagagcnnaggagagaacccacataatggtccaatcccncccanaccaccgggagaaattgaaattccaatttttaaaccctgtatccgattacacaattgtggtaatcgattaccagcagttagtaaacgttttattccaaatttaaaaagctgaattcgattacacaatggctgtaatcgattaccagacgggatttcagaaaaatagttgcaagagtcgcaactttataaatgctttacatctgaccaccatgggctatttatatgtgacttaacctgaaattgctcagagattttcagccaacagagtgttatcctctcaaaagcaatttcatttatcctcttaagatatcttagcaattcaatgcattcttaaggattaattgagtgctcatctgtaaatccatctcctcaagaagatttgttctttg

SEQ ID NO: 299032 - DNA, 414 bp, Glycine max
  unsure (1)..(414): unsure at all n locations
agcncatagctctctcttcacggaatgccattatggagtgatcaatggatattcttctttcaagtgcatgatacaaagatatggagttccaagtgggaaatataagttggttcccataggaactagagaggttgctaaccaaataggacccaacacaactattgtacctaaatctacattctatacattgttgtaggtgaacctatcaacagataaacaactatggtatcttgataacggttgctcaaggcatatgataggagacaagtcaaagtttatgtctctaaacgctaaagaatgaggatgtgtaatctatggtgataacaacaaacggagaattcttggtgtaggtaatattggtaattccctaactatctccatagagaatgtcttatacgtggaaaggctgaaaca

SEQ ID NO: 299033 - DNA, 393 bp, Glycine max
  unsure (1)..(393): unsure at all n locations
actttattatgctgctcctnngctnntaatccactgcttaatatccaaaataaacttgcaacctttgacttagacttgagaaagaaatccaacacattctggtgaaatcatctacaaagataatgtaatatttactctctctaagtgaagtggtcctttgaggtccgccaaatttgtgtgaatgaactgcagcttctctattgctctccaagttgattgtttgaagagtaatcttggttgcttgccatattaacatgtttcacagtttggtaattcagaatctaaatgaggtaatccatgaaccaactcctttcattgcatgtccaacataactgcatgatgataatggcctaatcttttgcgccagacttctataatatttatagtaactgg

SEQ ID NO: 299034 - DNA, 276 bp, Glycine max
  unsure (1)..(276): unsure at all n locations
acccatggcggagcgaggcagagcgtcgattccttcttgncagngnnagaagaaaagatggagtagcaaactaaccctagcgcagagaagagatattcttcttcgcggtaatatgtgcagtggcgagctggccgaagatacctgacctgcgttcgaaaatcaacccccttggaaatcccaacactagtgtggtacctgtgctcgacgattgggtggtcaaggggaagtaccttcggcgagcagacttcgacgcatcattcgtgaccttcgcaaacg

SEQ ID NO: 299035 - DNA, 429 bp, Glycine max
  unsure (1)..(429): unsure at all n locations
agcttangtgatcataattgcctcaatcatttccaaagtgcatgtgaattanggagcatcaacaagaatcaagccaaggctattgtgcaagcaatcaatgnggaaaaacacaccacatgattatgatgatggatggctcaaattctcacaatggtaaactcatcactttcaaattgagctttcaaaactatcatgacatgtagaggagaatcaaggatttcaagtcacaaaatgtcaagaacttttattatcaaaacaattacccatttgttgaacatatcctataattcatagaaaaacatgcaaagtcgtacatgcacacaaaattgacccataatattaaactagaaatccgacgaaactaacaacattaacaaattaacacaactaacaaattaacaaaccaacaatactagcaaaccaaagaca

SEQ ID NO: 299036 - DNA, 449 bp, Glycine max
  unsure (1)..(449): unsure at all n locations
ttgagacaaatgtggaatgntgagcactncaagatagattccggctatctccatggggcaagagggtaatgaaagaacttccaatgactactcataacatataatgatctgcctcgctgctacgatatcactactctaaaatgagaaatttcaattttaagtgaaagttgtattaatttgattatgaaaatggtgagaatatttttgcgatatacattcatcaagtaatgcatagattcacacacgcacacgcacacacgcacgcacacacacacacacagacacacacacacacgcacacagacatacatatattaaaccactatacatcattcacatgacaagatataattcagtgttcacatgtatctaaacttgtaattgcatgcccactcaacatcagtgaccaactaggaagaattgaaacagacatactctctaaagaactn

SEQ ID NO: 299037 - DNA, 420 bp, Glycine max
  unsure (1)..(420): unsure at all n locations
agcttactatattgcaattggatgcttcccgccaccagtgatcaagcctctttgatagccttaaacatctttctttcatcaatgtgcacactataatgttctctgaaatgttcatgtggctccacatgatntangtttggatgaaacctaagcttatcagccacccttttttccatccatttcattgtagcttgtttattnttgaagacccttccatatatgtgctcctccaaaaaagtgttgatttgaaagcttcttgtaacttcgaaccatgaacaataaatttcccatgaacatccaacttgtttacaacgcgctctagcttgaatgttgtcaactttacccatttcagatctcttgcatggaaaatagttaagtctctaacaacttcaataaacattntgatgctatcaaactcca

SEQ ID NO: 299038 - DNA, 455 bp, Glycine max
  unsure (1)..(455): unsure at all n locations
gccgatttagttnttgtcggcgagaggatcgaagtttgttttaattgttganaatnngatnatcctactgtgatgattgggattcctanggcanatggagagagtaagaatgagggaggaacccatgctatgactgccattcctacatggccaaatttcccaccagctcaacaatgtcaacactcagtcaatatcagctcttctcattacccaccatcctatcaaccaagaacacccaatcatccacaaaggccacccctaaaacaccaaccagagaaagaattttccagcaaagaagcctgtaagattcaccccaattntggtgtcgtatgctaacttactcccatatctactcaataatgcaatggtagccataatcccagccaaggttcctcaacctccatttttcgaggatacaactcgaatgcaacatgaactcatcatggaggagtctc

SEQ ID NO: 299039 - DNA, 326 bp, Glycine max
  unsure (1)..(326): unsure at all n locations
gggatgcctgtnctncnnnnatagaagtccccgacgngaggacggaggagcacttgttcttgaaaccaaggccactgttcggaatccacactgacttcaaagaggaggccctctcatacatgattcaacctccccaacaaatattgctaggtcgaaccccgttggactcaactcccacgatcctacatataagaggacacaatggagtctagtgggcatgatcacacaacgtgctgaagcacgaagatggactgcaccattggaccttaccctcatgaacttaaccaggccatctaatgcatagcccatatgactgaagagaactg

SEQ ID NO: 299040 - DNA, 387 bp, Glycine max
  unsure (1)..(387): unsure at all n locations
gacctaagtaaactaactcgcttagcacgacatgctggcttancgagtccatacaaactcagaaattaaaaactagaattttaaacactcgttaagccgaagtacagtggcttagcaagttcatacataaaagcataaattcaaacataaatgatgaacacgcttatcgggacagggctggcttancaagttcatcagataacccagaaattcatccaaaattgatgaattagcttagcgagtacatcgaaatttccaaaaaattggggcttcgaagcccctactttccagtcactttcaggcctaagaactctaatcaaaacacatcaaatgaacctacattacctaagaaactagatccctaacaacatataatcaaacaactag

SEQ ID NO: 299041 - DNA, 406 bp, Glycine max
  unsure (1)..(406): unsure at all n locations
cagggatgcgcctaatgcatgaacatattgatattaatgtcaagcatttcgttcttcgagatgacgatcctgagaacttgaataaattacagcccagaaatcaaccaaattagtgcgatccatcttgttctttaattaatcatccactgtggcaatatgatccacaattagtggggtaaagtttatacacaagtcagatcaaaataagagaattntaagtttatgcaaaacattggatattattcctcanaatatattanaatgaatgacatatatgtggcattctcgttgtgaagaataacatttcctccactgacacctcatgtataggttgcagccagcatgcatgcaatgagatatatatggatgaaagcaacaagtacgtgtctgagtngaacttgaacta

SEQ ID NO: 299042 - DNA, 465 bp, Glycine max
  unsure (1)..(465): unsure at all n locations
ngggtgtattctttnatcttgcannncgcgaancaacaaacncaggcttggaagagaagcgttgaggccattgattgatcttcatgttccgcancggccgctgagtgctcttgcgtctggacgagaatgacccactgattcttcctttggtggagacattgttcaggcgcaaatgattcagtggatggctcgactcagaggaagaagattcggtagtgtacgtttcattagggagctactttgaacttttctaaagacaaatggaagaaatcgcccttgggtattatattggggacgtccatcttgtgggtcgtaaataataagtactaactgaaataagaagaggagagggacttggtgctcgaaagaattggaaagtggggagatagtacatgtgtctctgtggaggtcttccatcttctggggtgttattaccccttgggtggaatcacctggaagcctgtt

SEQ ID NO: 299043 - DNA, 324 bp, Glycine max
  unsure (1)..(324): unsure at all n locations
ttttttgtttattggcntactcaaaacaggaccacgtttcatatttcttccctagcatngacataactgtcagttactgtcgaggcttctggagcatctataacttgttcactatattctgtgcgacatttgcgtggataagctgcatcaaatctctcttgtctctctggattccttcagcacgaaagtagtttatggttgtcaattgcttggcaactgtacttcgtatctctactttgacaatcttcttccgtatcgcatgcagagaagcccccttctcaagctcttgtaacaatacttttcttgcttcctcaaataccatct

SEQ ID NO: 299044 - DNA, 618 bp, Glycine max
  unsure (1)..(618): unsure at all n locations
cgaagcgatgacnactangnctctacgaannnccgcgacacnatatgaataatcaatgcttgnnaggattatgggagtacgccgatcacatgtgtgtactattgtgtgttggtcgcggcgaatggtgcacacgcagagtttatccgacatattttatantgcggcacatagaacaccacanatcgcccgtgtgggccgcacactaccaagctggagcgtcagcgtaccttcccatcgtaggccccaatatctctcngtcttcgtcatcagacacgcagagggccgctcatgcanatctcgtcgctcagagcgtatcccgcagacaatcgcgaaggtagatctcaaactattgcaagacagccacaacacgtatcacgagcgcaagaaaaacatgggcgaaagagcagaagaactcatgccctaaaactaccaacgcaaaagtcacgagctggttcccacgttaaaggaccgccagtgagcatttcctttcgatccaagttcggtaaccagctggatcgactcagtaaatgttactggaagtctctactacaaaagcctacattttgaccgttgagatatgctagcacatatccagaagtcattctgcactactctttn

SEQ ID NO: 299045 - DNA, 399 bp, Glycine max
  unsure (1)..(399): unsure at all n locations
ctagccggttataaggcacatttattctgaaattntaatggaatgtttgttgatgttatgtgctntaaggtttttattttcgtttatttataaaataaaatctgtccatttgtatgaatagacaattatgcatagttgtaacaagaaaaaaaaaaaaaaaaagagacacttgtgcaaagtcaattcaaccattgtatctttttttctcatctagaagtttgcatagatttataagaaaactaaaaagaattagtgcaaactccaaaattgatccttcagtttttgtcattaaattagtttctcaacaatagataagaaaaaaaaaacactaaaattcattttcttgtgttacaaaaatgttcagaggtttaagatgtgaagtgtgaacactgtaatctt

SEQ ID NO: 299046 - DNA, 139 bp, Glycine max
tcgcggacttaagtcaatggtcaaaccttcaccattctacgcttattccaccaccttggccgagacctcccctaggccacatgtccttaccatgtgtgctaagacatgtgtgctttccttttgggcttctactgagtct

SEQ ID NO: 299047 - DNA, 419 bp, Glycine max
  unsure (1)..(419): unsure at all n locations
agcttgttgttctttgtgtttgctggtggcaaatgggtttattgtattacatatgatgtgggggtgttagctcacaacttgtgtgtcaaactcatatctttatcaatatcagatatttgtgtgcaaaaaaaataaaataatgaatattaaaaatcaccgcaatattaaaagttatttcaaaatttaaatgttaatataatattaattntttaaatgaaaacttagaaagtattaaaataatacaattaaaaaatataaataattaaaatgaaaattnttaaactcaatatattaaattgaaactaaagtaaaatttaatgtaccaagtgtcattaagtcttttaaataatcacttaaaaatatcaattgatgagatttcaaataaaaatatttacatatttgcttatgacanaaataaa

SEQ ID NO: 299048 - DNA, 479 bp, Glycine max
  unsure (1)..(479): unsure at all n locations
gacacaatataatacagcagctgtggtgttntgcatgctgtttggtggcactaaagacatttgttctccccttaatctaataggccttgtctagattgtcatgttcaatcagaaaacaccaggtgaaatggagtctggaactctccacacctataaacagggctagtaaattttggttttttgttttatttacgaaagataatggatctgatggagcaagcagatataatggcacaacaagttttcccgaaggaacttataggtttagtgtcttaatataacaagatgttaatcggattgcctgttatattagaagttgattgaattccaccaagtaatagcattcataggtaatgttgcacagacaataaattaaaatgtatattntctgcctttttcttttcttggaagtcgatgcaatgacatgctcttcactgtggtgagtaaaagttcagatacatctacatagtatactaata

SEQ ID NO: 299049 - DNA, 479 bp, Glycine max
  unsure (1)..(479): unsure at all n locations
agagcggttagttcttgagatcncgcaatantgctctgtacccgcgatcctntanaatcgaacctgcaggcttccaacctggactattcccatcccaccccggccttattcggccgtggagaccttgtatgtaacttaaccagccaacctcttgccgtccaccaattaaatggaaaccagaacaccaaaccagggagcctggtgtggcctgcccacctgcaaattttggttattatgtgaatggtggcctctggtaatcaataaccaagggtgggtattcgatacaaggcttaaaatgaagacagaggctaagatggctctggaatcgttaccacgggtgtaatcgttaccaggcttgaaacgatgtcangaagctatgaagcctctggtatcgataccaagtgtgaatcgataccagcttataaagaactggagtgatgaacctctgaatcatacagcctggtatcatacacaagaag

SEQ ID NO: 299050 - DNA, 488 bp, Glycine max
  unsure (1)..(488): unsure at all n locations
agagatgacttgaacgcccaaaaaccgctgtgagacttttgaggcgtacttactcatgttcttatgggattcccctggaatcagcggagatataagatatatgtgagaggaggcgccattcctttaggaataagccctgggagaagggaccttcccaccacagatgaagcccttggattaagaaagcttggagaaagatgccttccattggaggaaaatgaaagaagggagagaaanaagagaggggcggagcctcganacttgatggaataaaaagaggtatagaaatggaacttttgaagtatgtctcacaagactctcattcatcaaagttacaacaagtggtacacatgcttctatttatagactaggtagcttccttgagaagctntctagagaaaacttncttgagaagcttctttgagaatacttccttgagaagctagagcttagctacacacacgcctctcataactaagctcacctcg

SEQ ID NO: 299051 - DNA, 219 bp, Glycine max
  unsure (1)..(219): unsure at all n locations
ccaaaaccagcttgaccaatcccgacccaccccgggcttagtcagtcagtgagaaccctgtgatgtacctaaacaaggcgagctcctggcagtcaaccgataaaagaacaaagaccacatagcaagggggcttgtgtggtggctggcaagctgtgaatcttgtgtgatatatgggatatggcctctggtaatcgattaccanaggtgggtaatctatta

SEQ ID NO: 299052 - DNA, 464 bp, Glycine max
  unsure (1)..(464): unsure at all n locations
agaagcattgctgagactgcaccaaaaacncagcttatagtgcggtcttggagacaaaggtcagnggtcgccaatattgnagatgaggtcccaagtccttcggattgggcccgaccatgccctctgatntccactgggaaattggcgaagggatgaacccccccggctttaccccacaagcattatgtaacccttaccggttttaaaaaccctataatttggccctagctttagaagtttcatttagtaaaggcttgtgtctttggttttgaattatataccaagatcttcttcatctgatcttgtctctaccattctcattctttgcatgttacttcttttctgaccggcagattcatgacgagtccccgagagactaatacctggacccgctatcaactcgacaagaacgatcaacggagatgaagagagagatgtggacttcttcgactagaaggtggccg

SEQ ID NO: 299053 - DNA, 431 bp, Glycine max
  unsure (1)..(431): unsure at all n locations
cgggcccagaaggagatttgaccttaatcttgcnnattcatagtaccngcactcaagaggaccgaggatgagcaaatttttcttaangacccaacccaaagatttctctataccttgttaaatctaggaaacctatgggtcagggcaatttactctaatttggggaaggaaccattagaatgaaaaggaaaaggtaccattaccccccacaaataagtgtttgttaaaaaagaagcaaaaaaataattgtgtggtaccaaaggtgaaagcacttacgaaatgaataggagaagctattgtacaaaacagaaagacattggattatctagacttggctctcttaaactaacgttgaatctaaaaaccaggatttttgaccacacctcctacacctgaaaatcttctatctattatatttttacttatgacta

SEQ ID NO: 299054 - DNA, 341 bp, Glycine max
  unsure (1)..(341): unsure at all n locations
agcttttataggatttattgaanatctcgactntatgtgggcatggatgtccgttagacgtattatattacaattagtatagaagtcttgttattaacctcatctattattttattagaatcatctttttgtgtattatcttattagaatctctaacttttttaaaaaaacaaagacattctaagatggttctttgaaaaaccatcttagaaagtatacattctaaaataattnttgaaaaaattatcttagaattcttaatatgtttaatttaaacaaaaacgttctagccatcttagaaaatataccttttaggaagggtctttgaaaaattgtcttac

SEQ ID NO: 299055 - DNA, 489 bp, Glycine max
  unsure (1)..(489): unsure at all n locations
gagtagttaagtntctgacacaanatactcacagcggaggaaagaaggcgcacggatagactgcattgtactcctggtagagactgattaatggggcgtggagagaacacataagacaccttcgtatgtgcctacctataaatctctcagcgtagcccaagagataaagaaatagaaaaaccatgtttgaaatatgctgcctaacgtctctttactgtccttacatgtacctactatccatgaggataccggatgccgataaatagtctgactaattcagaaaatgggacagtccgccgaccagttagtggatcgagtttcgaagaacatcattcgatgctgagagtactgtatgaccgtctccgaatgaacatgatgcgtgaagggtgaatggcattatgagacgacctacaggcaagttgcatcgaggagacaccttggcatagtggagtgatatcaagggataatcaaccgattgaccaagaagcg

SEQ ID NO: 299056 - DNA, 397 bp, Glycine max
  unsure (1)..(397): unsure at all n locations
agcttcattgatagaaattggtctaaattcatcaagctcctatgagccatcaacttttggaacaagtgtaatgaaggaggggttgacccccttgtgattacaccatgttcataaaagtcagcanaaaccttcaacacgtcatcctttagtgttggtcaaaactttgtaaagaacttaaatntaaagttatatggactcggacttttgttactatcacagttccttactacttctctaatctcactctcctgaaacttttcaacaagcatatcatttttcacaataggtttatgtttgaacgactctntaagcccccctaaccttggtctaatcccccctcatattgaaatctcctctcaaagaaacacttcanattctctntaaccagcattggatc

SEQ ID NO: 299057 - DNA, 448 bp, Glycine max
tatgtagttaaaaaggttagtcttctagtcattcaaaatgtctttttggctcaacagaccaacctatgtaaataaataccaataattccataataataatattattgtgtgattaacttattactataatactttaatatatacttgttagcctatttaaaggattatattcactagcttgcatacaagtgtagactcattagcctatgtagaagtatgtaacttattcaaattcaatagacctttaccacatagtaagcatttaaataaacttccaagcttaaccaaacttttaaaatgtcaagccatgccttaaaaaagcccatatccaggaaacaaggcagagctcagacctttgatttgtaaagtaagacacgctcaagccttaaatcctaacttaactcaatccgtttccaccttgacctgatcattacccacgtctaactaa

SEQ ID NO: 299058 - DNA, 416 bp, Glycine max
  unsure (1)..(416): unsure at all n locations
agctttattgtaatgttacgctccaacatcattttgagacgcacagtctgcacaacattcatgaaaacaacagaggtcaacagtntaaatatccaaggctaacggagaatgtgtatgaagaataatatatggcatgcttacgtgtaatccttttttttcaaaatgaagatgaaaaaatctaatgttgtcaaactactatgtagcctctatganaagatgacctcttctcagaagaaggcttcaatcaaccagagttaatcaagagaacctaagtccccaatatagatatacaatgtatccatgacaaactaaaatatacatgtatacatatattgatatatacatattgaaacaaacccactagccacaagctgcacatatatatatatatatatatatagcaataaccttaagag

SEQ ID NO: 299059 - DNA, 467 bp, Glycine max
  unsure (1)..(467): unsure at all n locations
tataaaactcaagggatgattttgcaagatctcacccaacagatcatctttttcaggcctagtnngcagagcttcaatttccaaccaacacatgatggtatntaacattctaattatatgtggaataggatttgtggacgatagggcgcttgtttatattctccaaaacttcattagggaacatgttctaatttggatgatgcccatgttgatnttccagttaggtgataaataaaaggaactgtccatggattactggatgaacaaaaataagtatattaaagttntgtatcctgctcgatgtctgttttagtcaacatttgagacttacttaatgttgacagtagataaaacattttgaactgataattggtggtgttctttaagctgtatgcttgcattacatttntcttctttatataataattaggtcatagctatttctacgtctcaagtgtntattcatg

SEQ ID NO: 299060 - DNA, 501 bp, Glycine max
  unsure (1)..(501): unsure at all n locations
agacttctattcattcgatcacacncnaatnaagctcgngcgcgggatcctctgagncgacctgctgcatgcaagcttggttcnatttnctcaacatangcaacaacgagcgatggtcattcatagaccactcacccaaatatctgagtgcgctggctacatcaaatgattgtgctcacctctttcggccgaatcgattatatatatatatctcataacaaatcctaccttcgtataaccacctgctactagagttgcaggtttcctcaacattgctagaggacatatgccagccttctgatagatctgatatacaacgtatctgcttcgctaattgtttatgacctggtattgaaccagacatatgtggcgccatctacatatggctatatgcagtgttgaatacactcacctgccatcaatgagatagggtccttcagtgttaccgcttcatagctttcaatcacatttacggccatttttgagttatgagtcggtccg

SEQ ID NO: 299061 - DNA, 488 bp, Glycine max
  unsure (1)..(488): unsure at all n locations
gagtatatactgagtactccccnctaacacnaagctggagatatggcggcaccataggcaatatgggccacttttgctccattctagccatcangacataaggaggcccctcctgaccatggaactccatatactgacaatgtgaagagagctataggcagcaatgggtcacacatgcgtgatctataatgtccgaagcatggacagatccggaacaaagactcatcattaattttttgattaactctcgagctggaaccatagtgttgaaaactgttaatggctcgaactttgttaatacaggggaaaatcttttccaatcgcctgatgccgctggagacgaagctgttaaacaaatgttattctagtagaaaccaacaatgagaactactaatgtttatccgggaaattgttggaggaaacaaggaacatatctattgactccgtgagcactcattgatctaattatgctccagatattggaaccg

SEQ ID NO: 299062 - DNA, 399 bp, Glycine max
  unsure (1)..(399): unsure at all n locations
attaccttttacctcggtggctgaatgaagtcccgtatatattcaaacgcctcgaattgaattcccaaactttgaaccaaattccaagaccattacctttttcctcgatggcagattggagtccggaatatatcgagacgctcgaaattgattattgaacctcaagcanattcaaatgaacatactttttactcggatgtctgattcagtcccgtaatatatcgagacgcttcgactagaatgccgaaactctgaganattcaaacgacaataactntntagtcagatgtctgattcaatccccgtatatatcgagacgctcggactngaaaagccgagctctgagcaaatcaaacgaacaaaattnttactcggatgtcagattgaggtccgtatatn

SEQ ID NO: 299063 - DNA, 437 bp, Glycine max
  unsure (1)..(437): unsure at all n locations
gaaactcagcttcacattcaattcaagcgtgtcgatatattacgggactctatcagacatccgagtaaaagggttattgtcgtttgaatttgttcagaccttcggtattccatttcgagcgtctcgatatattacggaactcagtcagacatccgagntaaaaggttattgtcgtctgaatttgctcagagcttcaacattcaatttcgagcgtccggatatattacgggactcaatcagacatccaagtaaaaatttatagtcgtttgaatttgctcagagcttcggtattccatttcgagcatctcgatatattacaggactcaatcagacatccgagtaaaaaattattgtcgttcgaatttgctcagagcctcaacattcaatttcgagcgtttcgatatattacgggactcaatcgaacatacgagtaaaaa

SEQ ID NO: 299064 - DNA, 410 bp, Glycine max
  unsure (1)..(410): unsure at all n locations
tatcttatatggcattccaatctccttaataagagatgggtganaaataaaatgatttgtgaaaatcagtggatctgtatggatgatacgaaattgcaccatttcaattcattcttgggtcataagactcagccatccaagattcctcttatgatatgaatcaatagcgttgccaaattgaataaaaaacatgactcataagattctaataactaggatcggctgctgccgctatccaagatcagtaactatgcgttaaatactccattggattgcagcacccaattaagatatcaagcgagcattgagtagacagttgtcaataatttaagaacaagctttagaacaaattatctagtccaacaagggaagattgaatttaacgagaagaagaagtgagaataccttga

SEQ ID NO: 299065 - DNA, 520 bp, Glycine max
  unsure (1)..(520): unsure at all n locations
gggcagtagtgcttgngangcttcgcannnncgcgacacnataganntactcagctntacacaatgantttattataacacataatcatgctattattataaattgtggaaggattgagagtatagtggattagttcgatgaatttcatgaaatttatattggttcaatatatttacatttaacctctattatataatactgaatattttaagcagtgacaaaatgcttactatcaaaataaatatatttatgcctgatgatgcttacatgtgagaataagcatgtgaataaaagaaatacgttatagggattcataaattcctaaaatgtatattttaagattttcactcgtttgctattctgcttaaataacttgacagttggacacctggacacccaccgaaatttcaatgctcttcataagtcgactattaaatgtgtcgcgcgtcactaatttatttagattctaattctatcgaaagaaccactgtgttttaatcattctataatagatatagg

SEQ ID NO: 299066 - DNA, 360 bp, Glycine max
  unsure (1)..(360): unsure at all n locations
ttttcttcttttaaagaataaaaatgaangaaggtagaagagattataaaaaaaaagattaccttcagagnaagaggcctataataatatttattntttattttcatatttactctaattaattcaagataggtcatgttatgcattccattgtccctctcatntcacattagaagggttattcttatcatgcacaacataatcatttattttaggtaatatctaatatttgataatcaatatttttttactatataaccaaactcacaattcanaatatttgataagaaacatagaaatcaaactaatatataaataaaaatacccaaaataaactattagaaaaatccctattacaca

SEQ ID NO: 299067 - DNA, 324 bp, Glycine max
acctataaaactcagcttctcctccggtatcggttcaagtcgattcatcgctcttatatcctcgcctcgatcacactccactcggatcatcaacgccgtcttcattttcctttacttgttcttcggtttttgcgtcggagggagaatcggaaccgaaaacgagaagggaaaggtctcttcttctatggaagggagtgagagtgggagagtggcggcggggactacagagaagggagaatcggcattggaattgaagggcagaagcggaatatgaagtgtgggaggggtgaatggaggagggggtgaggggacgtgcctctctcc

SEQ ID NO: 299068 - DNA, 429 bp, Glycine max
  unsure (1)..(429): unsure at all n locations
naagctttagtagtagaatcatgggaccaactcattntatttcanaaaggaagtcatatctagtcaaggtctgagagaccatacaagtntcctaacgatntctaattatgtgggccattaagtctatcatatgctgacaatagccgagaagcccatgaatctcttcngggcggagtangtgtctgccatcgccttggccttggctaacaatcggggaagttcttgactcccgttcaaggtaagagcaaaccgatccatccacatggttgcctcttggtgtaaagagtcgatcacccttcctctagcctctntttccgcgtatacttgggcatactcatccgcgattctatgctcgtgggccgtggctagacctaactcttcttggtacttggcaaagagtcgatcacccttcctctttcagaaccatgc

SEQ ID NO: 299069 - DNA, 467 bp, Glycine max
  unsure (1)..(467): unsure at all n locations
gagcagtgctagatcctggccatcaaactcagctnataagcgcgggttcgggagaccaaaggcaagccgtcgcattttgcaagattatatcccgagaccttgggattgggtccaaccatgccttcttgatttccagctgagaatatgggcgagtggaggaacgccccggcatttaccccacaagcctaattgtaacctttaccggtttaaaaactctataagtgggccttaggtttagaggtttttcttttggtaaggcttggggcttttgtttttgatttattatacagagatcttcttcatctgtccctggctttaccattctattcatttgatgttactcttttctgaacggcaatcgatgacagtccccgaagactaatcctggacccgctatcaacttcacaaaaatgaataaacggaaatgaaggaatgggatggggactccccagactagaagatggtcn

SEQ ID NO: 299070 - DNA, 408 bp, Glycine max
  unsure (1)..(408): unsure at all n locations
agcttgctctatctttttctgaattcatgcataagatactgacagttntttcctanacatttctaagaacgaaatagaaactgaaagatatggtatcgataatcaatttatcttaatgataaagtctaagagaatataaagaatctagtctggtatttctttttacctatttaatatntctaaatattatgagttctccatttagttttctattcttcagagacatgtaaacacaataaataaaagacttgccaaagccaaaatcatatttcaactataaataaacaagagttgcgaacacgcgtgtagataaattgaccactaattctggttcgaagaccactaaataaattgacgagtccactaattaaggagtgtctaatcgtctagggagtataatgtatagta

SEQ ID NO: 299071 - DNA, 335 bp, Glycine max
atagcaatatgcgaaatgtttttcctaactcctacttactagtatgagatgctgttttactcaagatgctgacaacaacgagttagtgggttatttcataataccctaatctatctcttctcttcatcgcaagcgacaacatagcgtaaaatagtctatcctatgagagcatcacaaggtggactcaaactgcaaaggaagcgagcatggtcttagcatacacggcaacaacatgtgaccttgggttggtcttggcaatggtattggcttcacggagaatggtgccaccaactgcggcaatcgagactaatgaacataagcagacaactatcaac

SEQ ID NO: 299072 - DNA, 365 bp, Glycine max
gttgaacatgattggattgaggatttgattgacaaaatggattaggggaatgtgatttcaaatctgcacttatgcagaatttgctggtcaaaataggtgccagcaggattttaactttggtgcaaaaaatgcttgtgtgtggttggctgtggaaagagtattacacaatgagttctggatgtttgctagtagatccccacggtcacaatgtaagcttatgcactatagacttccagtaaaattttggagtcgatccaacggttaacgaattggatccaaagaattgtactgtggtctttaaatgagaaaactatgattttggtgatgtgtgagcaaagtatctgcctttgctctgtttgttggct

SEQ ID NO: 299073 - DNA, 475 bp, Glycine max
  unsure (1)..(475): unsure at all n locations
nggaggctgtncatgcgtantgctnacnanacaaacncaagctnatggganaacatcacatgggcacnaagaagtagggggggaaaattatgggagagttttncactaaataccaagggagttagtgatttacagaagaagctacatctcacagaaacaagaaccacaatagccttgtcaagcttcagtcactagccttcaattatatagaaggtccgaggaagacataatacaaagaattaaatgaaaggaaagagggggagtttgctaaatgggggcacaagaaacctaagggggattttctatgcgacatgtaaagccatagctattatctggaccatacatgcccattctgggcacacctagggtgatgacagatctgctggtagcttgtgaacaacaacacagctaagggcacatacacaagcaggcacgtctcaaagaatgattagttcttgtgtgtggaccttggggg

SEQ ID NO: 299074 - DNA, 430 bp, Glycine max
  unsure (1)..(430): unsure at all n locations
agcttacatggtctcgatatagtgccatgtaggactgcggggtctgtggcaatgtggcataactcgtagaaatgtgttttgttttattttcggacaccaatatgnttactcggtagtagaattgcatttgnaagttgaaattanaattacaatnaaggatangtttgatgaatggagcatctgtatatanttttgcgcttatagatagaagcatttacattgagcacattttgcttttgccttttgcttatatgtattggctataaggttttggttaactggttntgctttaaagttgctttgaactgaaatccaagtgctaattaagatttgttgtagtgtagaatgcaacaaggtggcggagtggcataagtctcaagaatctcanagaaaaataaccttaataactgctttgcatacatgtaacaat

SEQ ID NO: 299075 - DNA, 513 bp, Glycine max
  unsure (1)..(513): unsure at all n locations
nnaatggctgggcatagagcanctncaacaananaaacacaagcnnatccctttggaccaacatgtgccagttcaattaccaccgcctgcttcggtcttccgtgggaaaacgtcaccggcgtgttctccgacaccggctggtacgccaccaaccaggttgccgttgacgtcattcttcagcacagaatgaaacaatacccatgcctcactcgcgaaccctccgtcggcggcgcgttctttcgttcctttctacgcgggttcgacatcgctcgctacctttggggatacaacatctcaatgcccgacgctgcatcgctagacctcgtgaattggctcatgaatagaccggagtggaagatcatgaacgggagagacccatttctcgttgccggtaagatcactngngatnntcggagactcactgaagaagaatcggattgggggaacaagcttttggnttttactgctgggaaaacatgtcgatgcttgtggtgagtcnagtccgtgaacgcg

SEQ ID NO: 299076 - DNA, 436 bp, Glycine max
  unsure (1)..(436): unsure at all n locations
cctgcttttcttttctcatccanaaggattccggcctacctttcttaattgccagtcaccttcctgtgtcttcctttggcaaccttcaccactgcttcaattcatgaagaaaaccttaggcttctcacaaatcttgcatttcatttcaaacccaagtcataccaccaattttcccaaaaagataaaagtggtttactggcatatcatcaaagtcaagtcaaactgttccatatgcttcaagatgagaaaagcactacttataaataaaacttacaatgtantataacatagaataaatattgtactanaactataatcnatatactaattatcccaaaagcanaaaacaaatgtcatcaggaattcaaaattcctgtgactggtcttgagtgtcctatgtctgcacatncctctcatctgtcagatgaagcactan

SEQ ID NO: 299077 - DNA, 454 bp, Glycine max
  unsure (1)..(454): unsure at all n locations
tggcaataaatactcctacattaatctcttcatgctttgnatgnnnggctcgncctttgtcacgggaagccggaaggtccatatcaccttcttaattgtacacatggggcactgcacccccaaatgcacaagtaagaagagataattttccgggctctcgtgtccgtaaaatgcattcatatcatgcatcgcataagcatctcttcataacatcatagtggacatatcctgcatttgtccgttatcatattccagcctcacattntgcatgagtcatggcatcatcatgcatatgcgttcaacanactttttgatctgcaaaattgcataccatttgttttcatgtttgctcatccttgcgttntcctctacaaaacanaaacaaaaaagggggaagcgtgaaacttcatactacattcttagtttcatgtgttaggcaccacgagccaaccat

SEQ ID NO: 299078 - DNA, 404 bp, Glycine max
  unsure (1)..(404): unsure at all n locations
agctttagtcttttcaactgcacaacgctcttaatatgggaagagtatccttgtggaaccttcacctgacgaagacactgacaataacttatcttttccttcttggacaaagtatggcaggctgggggcaagtaaattttcttcccatcagaccttggatgcaactgtgctcttatacccatatcagctagatcttgacgggtattcaagccatccttcgtcttgccttgaatgttaaggagcgtcccaatcacactgtcacaaacatttttcttcacatgcataacatcaatacaatgtctaacgtcaagatcacaccagtacggaagatcaaagaaaatggacctcttcttccatatgcaactctgactnttatccttcttttgggtcttcccaaatacagt

SEQ ID NO: 299079 - DNA, 496 bp, Glycine max
  unsure (1)..(496): unsure at all n locations
aagctgggcgtcgacanngctgcgacacnatagaatactgcagcgtgtcgattcattctatgtacccgtagcaggccacattgtgtttcttgcattactatccacgacgagtggactggttatacccagtgaggacgggcttaagccattntacttaaggcgtgagtcacttaactgaagatagaaggaatctgccccgaacggttgactgatattatcgcgtaacttcgggtggaatcaattgcgaccgttcggtcgtcgcgaaccacgttggaaagcataaacaggtagaaaacaagtatgtaatcgaagaaacatctcgttagtaaatagtgcgggaagataatcggacggtttctctttgggatgtctcatgcttaatcgagttgattggtactaaggtgaaactagagttagatcaactcgctaggcagctcgccacaaaagaggcttggaagttgcgttttgatgctcctaagaaaatggagatgtgacg

SEQ ID NO: 299080 - DNA, 386 bp, Glycine max
  unsure (1)..(386): unsure at all n locations
agcttaactatatgtatgcgaagtgggtggaattcctagagcaattcccttatgttatcaaacataaaaagggaaaaggtaatatngtagccgatgctctntctcggcgtcatgcattactttcagagaatggtttctttagacatgaaggctttcttttcaaagaaaacaaattgtgtgtgcctaaatgttctactagaaatttgcttgtttgtgaagcacatgaaggacggttaatggggcattttggggtccaaaagactctagatacattacaagaaccattttattggcctcatatgataaatgatgtgcacaatatttgtgaacattgcattgtatgtaaaaaggcaaagtctaaggtaaagcctcatggattgtatact

SEQ ID NO: 299081 - DNA, 380 bp, Glycine max
atatcttaagctgtagctacaaccttgatctccccctttggcgtcatcatatagccaaagaactcggagatgagcacagtgataacaatggagtagcaagatataagtatcagagtattaaatacaataagccaaactcataatcaagaaataatgaaaccagaatttaaataacataaaatgtcaacaaccacaaaatatccaagactgaaatgtaaaaacacgagataaataagcaaagtacttagcataataatgtaaatgctaagaaactaaaagccgaaatacacggcgtataaaagataaataatcagaatctaatagcttagaagactgaggaaggggtggaagatcgaaactctgacgaatgtatccgacat

SEQ ID NO: 299082 - DNA, 361 bp, Glycine max
  unsure (1)..(361): unsure at all n locations
agcttgtatatttccccaatntatggncatattggagtgaatntgatacatnaaatcttatttatggntaacactgtctctagaacatttccatagaatntaattgaagaaattgtgcactttcaggagaaaaaaaagctaagttttgaattgcaaaatatagcagttgggctaagctcagcagctggctaaacacatatccaccgctaagcacagcttgagcgcgcttagtgcaaaggagaatttggcagagcatcagcatcaaagtcgcgcgctaagcgcgggatcagtgcgctaagcgcagaatgtgccttcagccaggctaagctcgagactggcgctaagcccaatttcacttact

SEQ ID NO: 299083 - DNA, 473 bp, Glycine max
  unsure (1)..(473): unsure at all n locations
actcagctagaaagcaactggatgcgttggtcaacttggtaacctatcttgttcttgaatcagaaatctgtacctgtcgcaagggtttgtggtttgtgctcctctgctgaccaccatacagaccttngcccttccatgcagcaacctggagtaattgagcaacctgaagcttatgctgcanatatttacaatagacctcctcaacctcagcagcaaaatcaaccacagcagagcaattatgacctttccagcaacagatacaaccctggatggaggaatcaccctaacctcagatggtccagccctcagcaacaacaacaacagcctgctccttccttccaaaatgctgctggcctaagcagaccatacattcctccaccaatccaacaacagcaacaaccccagaaacagccaacagttgaggcccctccacaaccttccctcgaagaacttgtgaggcaaatgactatgca

SEQ ID NO: 299084 - DNA, 302 bp, Glycine max
  unsure (1)..(302): unsure at all n locations
agcttgnatcggtttttgaatacacgncatactgtttaggacgtgacataaatatacaacatgatatattataaattgattctaaagtcggacggaaatgcaatgagccagtttatgaaacaatgtcataactcctgtgtatatggttattgcatgtgatgattgataaatgactccgaagtcttatactttcgattaatatatacagggtttgatactggcgcttcttatttttatatcaatctggtgataatgatgtatagngtatacgttgacttgagatgtttgccactaattaagca

SEQ ID NO: 299085 - DNA, 380 bp, Glycine max
  unsure (1)..(380): unsure at all n locations
gagccctataggggatggaccttttcatgttacggagattattattatttatgcctataagnnggacctccgagaatagtatggagttagcaccacttataacattgctgatgtaattccttttgcaggtggagctgatattgatgaggaggaactaacagatttgacgtcaaatcctcttcaaagggaaggcgatgatgcactcctccctaagaagggaccagtctctagaaccatgagcaagaggctcgcagaacattgggctagagctaccgaagaaagccctaaggttcttatgaacctcaaggtaaatatctgaacccatgggccaaggttgcgtccaattatctttgtacatattagactaggatgtcattata

SEQ ID NO: 299086 - DNA, 516 bp, Glycine max
  unsure (1)..(516): unsure at all n locations
ngattgggaggatcnnagcntcgcannnnccatnatatncggaaagacacacggggatcgtntagagtggatgtgcacgcatacttgcttttatttaccaaacngnaacagaagcgcaccgcatgcagcataattnttattgtacacgaagtntcaattagacaaagtatcgttcttattaagaagacttgaactcattcattcctanatcctgaccnagcatgatcctaatgatcaagaaatgcgctcctatcctatcattcactaaaactggatttcctacaaatataaccacacatacaagacagggaaggtccaaggttatattgcctgatgcccagagaacagtgagtgtatacataatcatacctaatgactgatccctaaaaaggtaatacatatggatgacaagatctgaagtattactgacttccctacatattcagtaaataccaccatgttggttacagagacaccttacaatgcagaggattgcacttcgagaacagacacgtt

SEQ ID NO: 299087 - DNA, 293 bp, Glycine max
ggcaatatactcacacgttcgcggagacaaacaatatcgttaagttgtaagcagtcatgagtgcgtatgtttgctacactggccagggcagcgtgcacaggattacgttgtttgcgatgaaccatattagtaatcaattagtaataaattaatattttgaatataataaattctttaaagcgagaaaagtcacattaattattcaactaattgagtgaagtccttaaatgtttaaatataataatcaataatgtatgtacctagtggatgtattatctatctagttcttaaac

SEQ ID NO: 299088 - DNA, 380 bp, Glycine max
  unsure (1)..(380): unsure at all n locations
atctttagtaacatgcagctangaacccagaacggctgctgagttcttacagacaacgctgagagaaacaaatgaaaagataggacgatactgctttgcttatatgttcaattgaatctaatgagggaatcctctttccaaaggtctccccttcctacgagactgcaacacatcagatgcttagttccccaatacatacaaatattaatgctttaccttcaccgcttctactatgttagtcaagtgcttgctattacaactataaccaccttactcattctataacttcctataccttattagaagcacattaagaacaaacaagaccctaagagctgtcatggttcttgagtaagaaaccaatcactggaacacatcta

SEQ ID NO: 299089 - DNA, 388 bp, Glycine max
  unsure (1)..(388): unsure at all n locations
tttttttaataaattgtcttagtggcatttacgagagctggtggatgacagtaaagtnaatgattcatagataattgcattattagacccataccccagctgagtatcagccatcagggcacataacaagacaagactaagatttgacctcggttagatcggaatctaacccatcaggtaattgtgactcctcttatagaggaatgaaccaattaaaaccatgcataanaacagataatatattacatatctacagagcaagttaaatggctcagcagtattcatccacagcaccaccttataagtgtcactggcctcgcacatatttaaagatgttattaanagaacaaagagaatttcattactggtcaacactagtcctataagc

SEQ ID NO: 299090 - DNA, 418 bp, Glycine max
  unsure (1)..(418): unsure at all n locations
nttagttcctcccaataagtgcctgaaatatgtgtttctgatcttacacactacgtgctgttngcttgatattgccatgcatatctctatgatatcatgtgatgcaatcctaccccccaagggtattggatagaagactccaacaagtttgcgccagagatgcaagagaagaccctaaggttctcatgagccttaatgtagattttgagcccatgggcaaagtatgagcccacttatctttgtacatattagattaagatatcattatttttgggccttgtatttatggctctataatgtaagtaagggtccctagaaatgtacgatctttcagcccttgtattttaaggcacctatactagtttttgtattaagggtacttttgtaatttcacatgcattaagtgaatatgtgatgt

SEQ ID NO: 299091 - DNA, 432 bp, Glycine max
  unsure (1)..(432): unsure at all n locations
agggttttatctttgaacacgcgatcgactcgaaccgcggacttttagtggcctgagggggcgccttttccttgtattggataaaaaaatatggggcgggtttgagtaaaaaaatgacgataacgcataataaagattcgcatcagattttgcctctacccaaagtgtggaatgttcgtcgtctcaccagcatacaatcaatatatgaaaaaataggctttatcttggagttgaagaaactgatgcgtacgtggatattgcccactcgctctttgtcatcttctttatgcataatggtgggccttaatagcccagaaatcaaaagcagactccatgtaaaaaattaagacctattatcaaggaacctaacatttgctaaatgaaagcttggaactatacaaaggtctaaaacacgttaatttcatgaccttn

SEQ ID NO: 299092 - DNA, 478 bp, Glycine max
  unsure (1)..(478): unsure at all n locations
cacacccaccgcaaaacgaaaacaaaccacttaacagaactaacnnannnnacagggaagccatatcctcancctgcacaacaaaaaccngaggacgaaaaagcgngctcagagcgcagcangcncttatactattgagcaaatcaagcacatgcagcgagacagaagaaatgaactgacaacacaccccaataatctttccacggagcaaagaacacatatacgcagctgcaataacaccattagaagacccaagcacgccttaaaataaattcaagactgaacaatgggaaaaacaaaaccacccgctgcaaaggagaaaagagagggccaaaagaccaaagggccataccataacacaaggaaaaagcacaccactgagcaaaataaagctacaatagcaagagctctcctacacaaaacgaaccaaaaattcaggaccaccaaaaaaagacaaccagagccaaaaaagaacaac

SEQ ID NO: 299093 - DNA, 485 bp, Glycine max
  unsure (1)..(485): unsure at all n locations
agagaatgggtgaacctattgttatacccacngncgaattcgagcatcggaccgccgggattcctctagagccgacccggagggcaggcgcagcctgttgtactatgcagcgtctctcgangaaacacggcggngagcttgtgcatagtaggttaacaaaaaatgcatttggtacaaacttactagaagttcttgcacgcattctcgcggagactactctatattaagcttatgctcaactaagataaacaatggtttcatagcgctctttcattntagggtccctacaggtcttccaaaactttgaagctgctcttccatttctactccaacctatagcaaacgtaattacgtccaatcaactaacaatattcttgccggaaccaaaggcacgcttggaaaggataattggaggatcaccatagtaaaaataatatatattcactcaatgggattattaagaacatatcggcccttatgaaggg

SEQ ID NO: 299094 - DNA, 483 bp, Glycine max
  unsure (1)..(483): unsure at all n locations
ccgactttgatcttgatgactgcgcgctcatagnaaccccccgangaatangagtggngccagagtatcangacattaatttgttttctacaagcncaanagcccagagcgcttttgatcacaaagacgatgatcttcacaatcaaagaatgggttcaagatggaatcgataactcttcaggttcaaaagaactttggtctccggacccctagactccaacttcatgatccaagttccgagattcaagatctagaatccagactgcagatccacgattcatgagcatactccttcaagatcagtttcaaatggttttgttaaaaactcgagagcacatgatttttcctcacacctttacccaaaaagtgttactcctctgttatcaatactacactattgtaatcaattcccagtggaacaatggttgtcaacagctttcacctgaatttacaaccgttccacttgttatcaaagagtgtacg

SEQ ID NO: 299095 - DNA, 447 bp, Glycine max
  unsure (1)..(447): unsure at all n locations
aggagattttgctcgtatatctanggcgattncnagctcggaccccggggatcctctaaagtggacttgaggcaggcaaccnggtgtngaacctccaanggaggcgggacctgggagcttcatgggggtccttcatgggattttcacatggaaatgcacggaagactaaagaatataggtgagagaagcgccattcattaaagaataagccatggaagaatgagcttcacccaccaagatgatgccttggattaagaagcttggaaaagatgcttcaatggaggaaaagaaagagggagagaaagaaagaggggggagcacgatattgaaggaataaaagatgtatataagtggaactttgaagtatgtctcacaagactctcattcatcaaaggtacaacaaagtgttacacattgcttctatctatagactaaggtgcttgcttn

SEQ ID NO: 299096 - DNA, 541 bp, Glycine max
  unsure (1)..(541): unsure at all n locations
ggggtcggaagaaatcgangnnactttgnnananntctncnnnnnntntangnanaagngcccagcnnancanntccgcgnaccaggaggggcgagacacggaactanattanttctttactcttagaaggaaatctacctgtgcgggccgttggtggtngatagtaagcaaaccaagaggatgcctgcgacgcgaattggtttgcccatttgaatntgaatgttaaccttaacacacaataagcataccaagcccagtattgggtatggctcctctgaagccttaaacggacgaaagtgcataaactcctatttgttggtatgatgatggagaagcggtactttttggacctgaaatgctacaacagattaacgaacaagtgaagttgattcgagagaagatataagcatctcaggataggcagaagagctatatgatagaaggggaaaccattaattttctggaagagacatgggttttgaaggttctccaaaaccggagtcagaagagcctcaatgctagaagttacacccaagatcg

SEQ ID NO: 299097 - DNA, 173 bp, Glycine max
caacgattggtacctcaaaacctttacactgggcaatgaggggcattgtgcattagccttaagtgaacatacgggcaaatcaaaaattctcacctgtcgatgtttttaaacaacaaaaaaaggagggacaaaccctatgatttaatggattgatcaaacattaaaccacttca

SEQ ID NO: 299098 - DNA, 390 bp, Glycine max
  unsure (1)..(390): unsure at all n locations
gaggataaacttgatatccananataaanaanaaccncggcccantnnnagaagaggggagaaggaagataatggtcaccccctaggcactccggggggcaaatagcaaaaaaaacgccccctaaaaaaatccaaccgaggcccaccgaacgtaacgaacgaaacgcgatgaatcgagaagcaccgaacgtctcgacgaccacatcacactcaccgtctcaacaccaacggaagaccccaaccaactctaaaacaccaagacccgcgggcccattggccatgacttgaaaccgagtcataacctaatcccctgtgaggcaaagccacaataagctacccgctaccaaaaaaaaaaacccaccacgcggaagacaccgcactccgaaagag

SEQ ID NO: 299099 - DNA, 239 bp, Glycine max
aaccccatggatcaatgcatatactataccacaaggtccatgagtaaaaaatggtctcttattttatatgtagatgatattttacttgcagccagtgaatgggaaaggtgaaacaatttctctctaagaattttgacatgaatgatatgggtcatcttatgtcattggcattaagattcatagagataaacctcgagttattttatggttatcacaggaaaccctatttaaccaaattt

SEQ ID NO: 299100 - DNA, 432 bp, Glycine max
  unsure (1)..(432): unsure at all n locations
ggactttttctttttctatgaancncannatngananatccgncggagggaagaggccgcggcannctttttcttattaaaanaacacccagggaggggcgggagacaaaaaaacaaacncgggagaaaaaagccaagaaccccccaaccgaaaagatagcaaaacccaaacacgaggaacgggacggcagaaaaaaaaaaaancaacgacnaatagnacaaaacaccnaaancgctacaagggtaacgaaaaaagcacacatgactacctcaccgcaacgggagaggagcgacaagcgaacggccaaggaacaacgacaaaccgcaactttctagttgttgtatacgagtccaccaccatatatagtggacccgactccgaatatagcctaaacaattttatagatagtctatcattaaaactaatatacg

SEQ ID NO: 299101 - DNA, 172 bp, Glycine max
aaaaaaaaaaaacaattgctcttgcacgtatactatggggaaaataactattagccatatcgatcccacgaattatatggcatctcaggttaattacatgtggacgacaaaattaaatatatgaagctgacaataaaattttctccatttatggctactgtatttattgaat

SEQ ID NO: 299102 - DNA, 284 bp, Glycine max
  unsure (1)..(284): unsure at all n locations
atctttagtgcctatcanacgttgacacgtggcaatcaaagctactgcctaacggtcaacatccaattgtgacgtcgggggaccaacattgcaattttttataaaataaaggacccaattcgtgaattaaattatcggnggactaaatgccaaattggacctaaagtangggaccaaaagtgccaatttgccttttatttatataccccnacgaaatangtactactagttggtgcatatttaatggtcaaataatgctaagaagtttactagcagcttatcat

SEQ ID NO: 299103 - DNA, 195 bp, Glycine max
gcaagaattgcaggttaacatctaactgctccaagtgaagattctctgcagctactatgctcaaaataattctgatggtagtcatctttacaactggagagaagatctctatgaaatcaattccttgttttctgtgaaaccctttcaccacaagtctcgccttgtatcttcttttaccgtcagattctttcttta

SEQ ID NO: 299104 - DNA, 231 bp, Glycine max
cgcaactcagcgcgccaaaacacgcaaacacacaaaaggactttctatagcaaacgaccggacaaacagcggcgcgacgaccagagagcaccaaagggaaggacacgcagagcccccaagaagaacacagcaggctcaaaaaacaaaccaaacaccccaaaccaaacagaggacaagaaaagggcagaaaaaagctaagtacccgaaaccagagaaccggcaccaacaaaa

SEQ ID NO: 299105 - DNA, 266 bp, Glycine max
  unsure (1)..(266): unsure at all n locations
ncaagctttctcatagagatctaggaaggataaagcgggtgaatgaaccaattccgctcccgaatatgacagcctccattntaggagcgctgagcaccagcagcgcttcgaggccatcaagggatggtcatttctccgggagcgacgcgtccagctcanggacgacgagtatacccactttcaggaggagatagttcgccggcgttgggcatcactggttacccccatggccaaattcgacccacacataatcctcgaatttatgc

SEQ ID NO: 299106 - DNA, 283 bp, Glycine max
aagaattcgccaaggactaaccgtctgaattcttcttgtgtctctcttctcccttttccaaaagaacaaaggactaacacgctgaattattttgtgtctcccttctcccttgacaaagaattcaaaatgacacagtctgagaattcttttgattcttccctttccgtaatacaaaagtgttcaaaggactaaccgcctgagaattcttttgtatccccattcacaaagtatcacaagcttaacagcctgagatctttgtctaacacattagagggtacattct

SEQ ID NO: 299107 - DNA, 310 bp, Glycine max
  unsure (1)..(310): unsure at all n locations
agctnattatatcgagacgatcaaaattgaacaacggaagctctcgtgaaattaaaatggtcataagttttaactcggatgtccgattcangagcttcacatatcgagatgcacganattgaacaatggaagctctagagaaattctaatggtcataaattttcacaccgaggtcctattcangcgcttaatatatccagacgctcgaaattgaacaatggaagctctcgagatattcaaatggtcattacttttcactcggatgtccgattcaagcgtatcacatatccacacgcttggaattgattaa

SEQ ID NO: 299108 - DNA, 348 bp, Glycine max
  unsure (1)..(348): unsure at all n locations
ggattntctangctcgagaagtgaaatttagaatgaggtacatntgaagcaaactctcacctcacacaagtacataacatcaatctaaacttgctcanactggatttacacctaaaattacaccgaatncaaaattgactcctcaacacccaattttgccctagaaatggctcttggttcactttggtcatttgtttttctctctagcatagcctaacctttctcataagtcctaaatggcatttcaagctaggattaactcattttaacctccatttactacagaatccagatatagcctgtcaactctcagagcctgactctttttccactcataacaccacattc

SEQ ID NO: 299109 - DNA, 309 bp, Glycine max
  unsure (1)..(309): unsure at all n locations
agctttcattgttcaattncgagcgncncgangtggtatgcgcctgaatctgacctccgtgtgaaaagttatgaccatttgaatttctcgagagcttccgttgttcaattttgagtgtctcgatatattatacgcctgaatcggacctccgagtgaaacattatgaccatttgaaatgctcaagagcttccattgttcaatatcgagcgactcgatttattatgcgccagaatcggaccttttagtgaaaagttatgaccatttgaatttctcgagagctctcggtgttcaattttgagcggcttgata

SEQ ID NO: 299110 - DNA, 495 bp, Glycine max
  unsure (1)..(495): unsure at all n locations
gggcagtctagtttcttatgntntcannncnnnnanantaannnaccgnccgngcannnnagaggggcagaagaggagcacccggttgattgatattcgcgcacaananancgagacgcgcgaaagagaacaanggaaacccncgagcaanncaaangaacanaacnnnngcacaaggancgccgagacaggcaccaaagacaccgagacgcgcgaccaagaaccacggcagcgcncgagaaaaaccaagggacccaacagcgaacgcggaggcgcgacgcacgcgcaaaagaaancgagacgcccgaanacgaacaacggaagcccgcgagacaaacaagggggcagaaccgaccccacagacgggcgagacaagcgcacagaagagcaagaacggccgaaaacgaacaacggaagcacgcgggaaaggcaaaggaccagacccccaaccagggagcccaaccaaccngcaaaacancgaacccgggaaagaag

SEQ ID NO: 299111 - DNA, 173 bp, Glycine max
agctttgtatgaggctgaagaagctgttgctcgtgttcaacaagatccggtggagattaatttatctcagcctaatttgtcacaagatagtgacatagagttgatggtaaatatttgtcacaagtatagcaatataggagatagttttgatatattacaagttttattcatgt

SEQ ID NO: 299112 - DNA, 370 bp, Glycine max
  unsure (1)..(370): unsure at all n locations
ctcacgcttatacctctccatgtatcgaatagagactctgattccatangtnggaagctagnnatcctgtccttgatagcttcgatattcttatttcgaacacaattgtttgaagaagtcgtctttgattctctcccatgaggttagactatggtgtggttgagaattgagtcattcacgtgcacttccccttaatgaanacggaagaaagtgcatcttaatgtggctatctttgattatgagtattcttactaatgtgcatatttgttggaatcgtgtnaggtgggtattcagttcttcactgctggatcccataaattgagtgttatggagagtattaatggtcccgctangaagaattacttgatgt

SEQ ID NO: 299113 - DNA, 82 bp, Glycine max
  unsure (1)..(82): unsure at all n locations
agcttttatccaaaatcctgactcaccatanaccttgacccagagtgagaatgtcaatccttaccctcggaagcaaaaaaaa

SEQ ID NO: 299114 - DNA, 341 bp, Glycine max
  unsure (1)..(341): unsure at all n locations
tgccacccagctcgcccaagcgagctaggttgcttcttccataangcaccgccttctggagaacttcctagaaggcccaagtgggcctgggttgctattgcaccccatgtntactgaatacacccctttgccttttttgttgattctttttccgtaacgttaaagaatcttacgaattacgtaacgatacttgttttcttttcgtattgttatgaaaccttatggatcacgtaatcatcccttttttggcttccgggatgttacggaactttacggattgcgcactaacacttccttttgactttcggcatgtctcggaacttcacgaaatgcctaacaat

SEQ ID NO: 299115 - DNA, 439 bp, Glycine max
  unsure (1)..(439): unsure at all n locations
ggagtagaccatgtatatcaggnaatcactcgtcccgggatccctagagtcaacctgcaggcttgcaacctggcttggtttggagcttctattggaggctgggatctgttgagccttcaatgaggtccctctaatggtgattttccaccatggagatgcagcggaagacanaggaaaagaagtgagatgangcgccatccactanggaataagccatggaagaaggagcttcaccaccaagatgagccttggataagaagcttggagagaatgcttcaatggaggaaaagaaagagggagagaaagagagaggggggagcacgaaattgaagggataaaagaggagagaagtggactttgaatatgttcacaagatctaattctcaaagtacataaatgtacacatgctcttttatagacttggacttctttaaaactn

SEQ ID NO: 299116 - DNA, 394 bp, Glycine max
  unsure (1)..(394): unsure at all n locations
aatgacgagtatgtgtaattgtaataagctccttagttgatattctagtcataatnaggatgcgtgctntaaagttttacaatgcttgaatntgtgtgataatcttgaatatgcatttcaacttactcatttaacttttataatattgatccatggttaaggattgaaatctttcgaaacatgttttggaaaatacttaagtttttatcccgcatcanataattgattatatgatgatataattgattatcttgatgatgatgcctttgtttttcataattgagaaagactcanaattagtctattatcttgagtgaataattaattatatggaattgaaacaaattttactatcacagataattaattatatgatgatataattgattatatg

SEQ ID NO: 299117 - DNA, 451 bp, Glycine max
  unsure (1)..(451): unsure at all n locations
agggagagtganncttcgttactactccgcgatttcgagctcggcccccgggttccttataaggcgaccttgaggcttccaacnntttaaatctttcctcctgactactggctctggctttttctcctatcaaatcatacgcactgtgagttgaatatttgccctctggatctgtaagaccactcccaagtatctgaacccttgttgtggattttattttctgcaatatctttgagaaagttagccgctaaggtgatcttattgtcaaacaaggctcttcttcaagcaaagttccattcccaccccatgccttgatacccttccatggatcttatgaattgatgcttgttcaatgagaactgataaagtctaggttcttctttggcattgacccaaaatgaaatgatgccgaattgaggcaccctcattcctttgatacattagatttaan

SEQ ID NO: 299118 - DNA, 339 bp, Glycine max
  unsure (1)..(339): unsure at all n locations
atatatattagaggatttgtatataaatatgtaaaaatatataaaaatcattatccaaattaatatatattcaaatgattntatattcacacatgtcttgcattatgttaatttatgcaaacatantttgaaaattattatctttataagcatattcgcatttgcatatgacttttatatatatatatatataattttaataagaaaattagtaataaaaaatatattacattntgtaattattagttntatactcctatcatcataagggggaaaagtatactactaaaataaaactttaaatttattgggtttatactcatatcatcaagtgtacta

SEQ ID NO: 299119 - DNA, 359 bp, Glycine max
acctttttaattgcggctctggaaaacaaaggtcaggggtccgcaatatgtgaaaatgaggttccaagtacttcggatttggtccgaccatgcccctctgatttccagctgggaaattggcgagtggaggaacgccccggcgtttacgcaacaagcataatggtaacctttacgggtttaaaagctctatagttgggcctaggctttagagttttctttttgttaaagctttgtgtcttttggttttgaatttataatacaaggatctttcttcatctgttcctggtctctacccattctcattcatttgcatggttacttctttttctgaaaccgcagattcgatgacgagtcccccg

SEQ ID NO: 299120 - DNA, 257 bp, Glycine max
gacatcaaccggtccatagagtgtaaggagtatccacaaggcgcttctggcaacgacaagaggatgttgcagaggttggaaactagtttctttctaagtgggggtatcatgatggacctcattggaaccttgtggccttggatcttcttcatcaatggaagtccttgcttcttgaatttaatggcagcaaaatggaaaagaagaagagttgagaggagacaccacttcaaggagaagatgagtctagaagaagctca

SEQ ID NO: 299121 - DNA, 332 bp, Glycine max
  unsure (1)..(332): unsure at all n locations
agctaataccagtatccagattaagtggaaaacacgttccaaaggtggagaatggaaatggccttcctcaaaaaacctaatttcaaccaaatatgagtttaatttttcgacaatatgcttattaaatcatttaagaaagctngaactagctatgcttcaaatggaatctaaacacaagttcttcaaaacaaatctaaaacatgataatagaaatcaatgaagtcacaagtgaaattaaaaagctaacaatagaaaaaatatattgaatcacaaattcttatatagttatacaaatcaaagctcattggaaaagaagaaagaaagaagagaaa

SEQ ID NO: 299122 - DNA, 476 bp, Glycine max
  unsure (1)..(476): unsure at all n locations
nnaaacggaacttttagtttctacncattaaacacaagccgaaagactanctgctccatttacataaacaaccaaaccacttggttatatttccgcatcatatggatagacctggacagtgtatcatcagcagtaaaatcccagcaaataatatattcaatcctaatattaaccggattactgcactacttttctttcacaaaaatggaaaaattaccctctcccatggtaaagttcgaaatgagtntacattagggcaagtgttgccagactacttatgtatcgaggcaagcaccttcccaatggtgcagtgttgcttaaggcaagcatatttgtcacctaatctacanggcaacacngaagatgtaaaggcatatctgcttctataaaccatagtaggtccttgtgaatgccctcacagacctgagatagttacaccttacggcataacaaggctatcaatctttacagacctn

SEQ ID NO: 299123 - DNA, 439 bp, Glycine max
  unsure (1)..(439): unsure at all n locations
aaaaacacggggcgttgtaatnctacgnaatananaaaggccncggggagacccaaaggcgaccagcaggaagcgcaacanttttttttaccaaaggnccaaaaccacaggggcggggggagangcangccacccaacggaagacacacacgaagaacaagggccatgaacaccgggaagaacatccagtgcatcaagatggccaacgtgacgaaacaaagacgcaaggaaagcccccggggaacaagccaaggaacaagccggaacgccggaactgcatgaccaggatatagacggacaaaggaacatacctaggagaaaagagacccaccacgcaagtcgcaccattggaaagaagtccaaacaaggcggcgaaaatggaccaacaaacaggaaaccaactgggcccgggaaggggagcaagaaaacacatccaagg

SEQ ID NO: 299124 - DNA, 405 bp, Glycine max
  unsure (1)..(405): unsure at all n locations
aataggttttagtttctanctnataanancngccacgcgacgggagaaaacccccacccttgtctttaccacacnaacaggggggggtgcacggccacccagaggggaaacccccacgagcaggggnacaccacacaaagcaacgctcaaccttaaggaagactgctacaaacgtcgttcactcacttctccaccaggcttcctatggctccttcaatgtagtccaccacatccatcctccataacaaaagaggcagctctcttgccaaaacatgcgaaaccgagggaaacacagcctcatcttttatacccgtcaatgcgacaatgcttcccattccatcacgatccagtattctactaactgcttacggaacttgccaaaacaccgcatatgcaatagccttn

SEQ ID NO: 299125 - DNA, 350 bp, Glycine max
  unsure (1)..(350): unsure at all n locations
ccccggggtaccttagagaccccaggcaggagccacgttggtgancatcctagacgcagatcgggagctatgcaatgacactcaggtgtctcgctaacgccaataccttctgatagaaaagtatgaataggcttagcaccttgctcgcaaacctattctgagaaaaaaatttttcggtctcgactctcgcgggatatcgcactgacccatgactacagattataagccgctcatgccttgtcgcgctcacgccagtctattctagtggatactgctttcttttgataatctgaaatctgtctagctcaatggatacaatggtcctgaagaggagggcacttcctaccccg

SEQ ID NO: 299126 - DNA, 485 bp, Glycine max
  unsure (1)..(485): unsure at all n locations
ggcatccttttaccttcngaccgtgaacctagannacnaaccccacgttgaatgactgggatgtctgagtatggccagcgactttcattcatctcttgcggcagcnggaacagggcgggtcttagtaataatatgctctcactacagaccacactgtgaacgggcactnctattactcatgatcatgcatccgagatgagctcaaggtggtgaatccgcacacagcttgctcattgtaaatgtgtgcaagaatatcttgatccttataaacgaaacgagcatnattctataaaagtagagaatgtatgtagaagtgcctctgtttataaatcaccgcattgaataacaatgaatattcacttgttgtgcataatttaaatgacacacaatatctaaatgtgatgcagtactcacacgctataacataatagntttgtgaccctcccccagcgacaatgttcccgcgacctgacaggatgtgccct

SEQ ID NO: 299127 - DNA, 440 bp, Glycine max
  unsure (1)..(440): unsure at all n locations
ncccctttgatgcttgataccacggcgatttcagctcgcacccgggatcctcagagtcgacctgcggcatgcaagcnttttatccaaagctcatcttgggggngaagctccttttttcatggcttattccttatggnatggcgccctcctctcacctttatcctttgtcttcccctgcatctncatggtggaaaatcaccattaaaggaccccatttgaagctcaaagatccagcctncatagaagccccacaagcaagcttccatcagtaattntcccagagtgtacaggatagcacctgtccactatcagaaggaaacaacaattaatgtatcaatatatcagcaactaatcatcatcagatacaaacaacaatcacaccccctcaattaattgtaaagaatacctcaaatccttaaatcaaacaccctcgatttttg

SEQ ID NO: 299128 - DNA, 432 bp, Glycine max
  unsure (1)..(432): unsure at all n locations
tatgtataatttttgaaggtacagatgtagaacgtttaattagtttanttaacaaaaagnaaacaacatttctagcatttgatgagaatgaaatgggatatactacaacttgcacatgtgtaaatttattcataatagtatattggaaaatcatgagttgcttgtagcattcaaagaaggagatcaaagcaatattttgcgattatgaaagccccaaaagtttggggcttagaaatatgtagtgcgatattgtgattttgtntgagattagtggaggctagtgatattgaaggttgggcaacatatgtgttacacgagaaattgaaatttaaatataaaaaatagtcgaaaatatganataaagaacaactttggaatgtangaaaaggctgcataaattgaaagaacaaattatataatggtattgtagtg

SEQ ID NO: 299129 - DNA, 322 bp, Glycine max
  unsure (1)..(322): unsure at all n locations
agctttcnttcaacgaagagaagagaaagacgggagattgcggaaatacaagnagaagggatgtctcctccacctctaggacctcacaatcactcacaaactcatctcaagctctcaagacggcttcctcttcaagctctggtctctgctaatcttcacacaacaaaatctctcaaactctttggaacttggacctttctctctctataactaaagacatgccagagctcctcaagaaaaatggccaaactccatctctaaatctgattttatgcttaaataggtggctttgattgtgctcatgcgcttaatgcaactctga

SEQ ID NO: 299130 - DNA, 319 bp, Glycine max
  unsure (1)..(319): unsure at all n locations
tttgtgctagtgtgcttagcgtgactatggaccgctcagctcacattagtggattttggcttagtgcgcgctattctcgctcactggatggactgaagcggngcgcttagcgggatgacccttcgctcaatgcaaatgcacaactcattcttgctctagattcttcctcgcactcagctgaggagtgatgcgctcatcggatggctcgctaagccagaagattggcttatcgagcggatgaaaatcaacacttcacgaacttgcctagataactttgaaatgagaggaaatggttattaaacacacaagatgggagttc

SEQ ID NO: 299131 - DNA, 103 bp, Glycine max
tcgcgaccaatttcttgtttgacatcttaatcttgaattctggcattcatccactaatatcacatatactcgcgcaccaccatgcgtgagaggctctatcccg

SEQ ID NO: 299132 - DNA, 353 bp, Glycine max
  unsure (1)..(353): unsure at all n locations
atggtttcttctaccctactcctatcgactagtggagccagtccaagtgatagaggtgtcatcctctgaagaggatcctgaggaggacctanaggagttacctcctgagcctgctgtggatgctcttgaccttccagaggatgatgaggacccacttcctgatgtggattctccagaggatatcttgtcagcatttgagacagactctacagaggagagcggccctggagggatagcgaacagtgaagacttttcatcatagcagacgactccttagactaggcttacatactttttgtgcgtgggtgtatctaagtcagactgctanggttactcttttgatttttgggtgg

SEQ ID NO: 299133 - DNA, 372 bp, Glycine max
  unsure (1)..(372): unsure at all n locations
ccacagcagaacaattatgacctttccagcaacagatacaaccctggatggaggaatcaccctaacctcagatggtctagctctcagcaacaacagcaacctgctccttccttccaaaatgctgctggcccaagcagaccatacattcctccaccaatccaacaacagcaacaaccccagaaacagccaacagttgaggcccctccacaaccttccctcgaagaacttgtgaggcaaatgactatgcagaacatgcagtttcagcaagagaccagagcctncattcagagcttaaccaatcagatgggacaattggctacccaattgaatcaacaacagtcccagaattctgacaagctgccttctcaagct

SEQ ID NO: 299134 - DNA, 429 bp, Glycine max
  unsure (1)..(429): unsure at all n locations
cgccccgtgggcttgacntacagcgaatnaggaacccccgcgggatccaaggagcgaccagacggaggcatttttttaagcgcggaccccggcgcaacgcggggtgcatcccggcatgatgctcactcccttgggcgcgccagtatgaaatacaagcgaccaatgctaggccggacaccgggaatatccggacataagacatgcaccgtgcctaaggaaatggcttcccaaaagcccacaagctgagcccaaaaaggacgcccagaaacaagagacccaacgcaacctgcagcagagaacaaaaagaaacgtacatgactctccaaatgccaatcagaacagaaagacggccaacgattgccaaaccgtccaaatagcgcgtgctatgaaacaaaaaacgctggataaaaaaacacccccagcgaatgg

SEQ ID NO: 299135 - DNA, 511 bp, Glycine max
  unsure (1)..(511): unsure at all n locations
nnttatttggggaaattccccnanngntnnnntntnnnnnntnngcnaancngnccnnagaggantgaaggacgaggagaggagacgagcgtttacttagngttcgacgccnacnagncnccaacacaggcatggcggctangagcacccnaaacacngcaacatccacgggccacagaagggacaccgccgcgagctccaccgccacattttgacgacatcgtctttggagactggagatacgcaggacaaacacggtatttgaagggcccatgggttacagttgccctctgagaaggagacatgatccacacgtcagtcttatgggacgacgccccttattctgacggtcagacatgaacctggatatctcgatcactcaactgactgatgcacataaataccgtaataaaattccttcaacagcacgtgggacggaaaaagtatagaccgttagcatcgacaatgtcctcacattgcggtgatggagccagaccaccatcgcgtcttg

SEQ ID NO: 299136 - DNA, 308 bp, Glycine max
  unsure (1)..(308): unsure at all n locations
agctttttgaccatgcaaacactaaggcttagggttcgtttccccctttcaatcaacccaatgtttccaaaaaatgctcctttaccaagtcatgcatacatccaagtncatttangcatttcgggaaaacctttcattgcgttcaccctttaagcgcacattcttttttcttcaaaaacctttttgtgttatgatccgggaattttccaaagaaaactggcggtcattctttttaaaaacatgttggcctttttagttttctttcccttagctttttttcttttcaataatttctttcaagcaaaaac

SEQ ID NO: 299137 - DNA, 495 bp, Glycine max
  unsure (1)..(495): unsure at all n locations
nnnaaatcgagatcgacngccttagtacnnnctgnganaatttagannactcaccctngtccacaaanaatcactaaaaatggnnnattgtctaacttcttaaacggncctcttttgctttatgcggttaacatggaccgttcaaaagcataaaatcaacacatcactttactacctttcgcgagaactacgtangtctgatttcctcttcgatggaggatacataagagcaaaaagtccccttttgtcgaccttgtgagatggttagaggtccaatgccttaaattttttcaccaagtaaaatggatcattttaaggtccaatgccttaaatgaccaccttccaagtaaaaagaatcacttgattcgccccttttgcaagaactacgtangtctgatttcctcatcgcaattgaggatacccngagcaaaaaccccgcttttgtcaccaccccaagagaactgtatggtccaacccttatcgttctctcttttn

SEQ ID NO: 299138 - DNA, 344 bp, Glycine max
atatattacccaatttaatcggacatccgagtaaaaagttattgtcgtttgaatttcctacgagcttccgtgttcaatttcaacgcctcgatatattacaagactcaaccggaaattcgcgtgttaaggtattggcaattcaattttctcagaactttggatctaaattttgagcgtctcgatatattaccggactcaaccagacatctgtgtataaaagtattggcatttcaatttgctcacagcttctaatctcacatttggagccttctcatatattaacccgatccatcgaccatccgagaaaaagaattgtcgttgaaaattctacaaccttccgttcg

SEQ ID NO: 299139 - DNA, 433 bp, Glycine max
  unsure (1)..(433): unsure at all n locations
tctggtgggacatcttgacttgctttccaatcngacattctctacagattctgccttcnnctatnntcagagggggaatgcctctaacagcacctttgtcaatgattttcttcatgcctcttaagtgcagatgtccaaatatttgatgccatattttgacttcatcttctttggagaatagacatgtggaggagtaactggtttcttgaggtgtccataggtaacagttgtcctttgatctgctgcccttcattaggacttcactcttctcatttgtcaccaagcattctgactntgtgaagtttacattgaatccttcatcacacaactgactgatgctgatcaagttcgcagtcagtcccttcaccagcagtactttgttcagactangaagtccatcatggactagctttcccattccagtgatctttca

SEQ ID NO: 299140 - DNA, 151 bp, Glycine max
actccatttttatatattacaattattcatgtctgacatttgcatgtagggccctgcaactattgttccaccaatagctaggaataagctaaccataacaagagccataccaaggaaggttgttgattaagatgatgccgtataaagaaaa

SEQ ID NO: 299141 - DNA, 425 bp, Glycine max
ttgcgactagaatcaccaatagaaccccagcgcaagcggaaagcagaaattgtacgtgaaaaacccaccgagcgcggcgagacgaacacgaacccaccccgagaagaatcggccaaaggaaaaccggtcatccacagactggatacctgcgtcatcggaaacagaccttcaacggggaagaacctcgaaccaagcaattcgacacattccaggcgcccgcagaggcccacaaagaggtacgtgcattgcgagacacagcgggtagaaccgaaagaccccccagatgacgagaccaaaccaggccactaaggcacccttggcaacataagaaaaaaaaattacaccgaacggtgaacgaccaacataacacggaaaaaaaaatccgacggcggcggccgaaacgctcggaaaaaaagacgaaaaac

SEQ ID NO: 299142 - DNA, 286 bp, Glycine max
agcttattgtattaagtgaaatagaggatgataacggtgtgataatcccaaggaagtgaaaagcgaaacaagaagaaccaaagaggtagaggcctgatcaaccaattatcacatcctcttttccaaagaagagaaagataagacctagatgcaagttcttaaccctaaaggaacccattaagatcccatccttcattgtctcttgttcgtctgatagtgaggcaactccaactcccaatacacatccattcagtccaccaccagtgtagaccaagaagcctacata

SEQ ID NO: 299143 - DNA, 479 bp, Glycine max
  unsure (1)..(479): unsure at all n locations
nggcagacttcttcatgcagtatcngacctcatnaatactaagcttaccttttaaggccaaaccattcaccttggggtggcaccatgttatttggttttgcaccaanaggtgggaaaggatggtccatcatgtgcttgtaggtgtacgataggtaactcaaataaccttaggtaaaaaaatgcccttggttatttgggggtagcaaaaatactttcttggaaaataatngaatggatgtatatattgcgtgtagggtaccaaaaatgctcataaatgtatatattgcatgataggtagccaaaaaccttgtggattaattaactacgtagcacagtaccctattatttaagtaattaaatactttgtgggtttagttaagataggaacaaaatgcctctacaatgtattatattttgcanagaaatgcctcacaaacttatatgtattgatgtaggtagcaaaaccttgcaattaattt

SEQ ID NO: 299144 - DNA, 344 bp, Glycine max
  unsure (1)..(344): unsure at all n locations
ttccaaccttttttgtgaattgaggatggacccctaatctggggtttgaataaaaaattttaaaatttaaggaaattaaaaatgcctagaattaaatttgtttgattttaatttctttcatttttcaaatgcttttgttggataaatcaattcaaatttcatcaattntaaattctttgtttggataaggcaattcaattttctccatatgcaaattntcaattttatattntanatagatgaaattttaatattaaactttatagaaaacaaacacatctattttgaaatattaattaaaaatattttcatttttaatatttaaaatactaatattgatattt

SEQ ID NO: 299145 - DNA, 395 bp, Glycine max
  unsure (1)..(395): unsure at all n locations
actaagctgctgagtgaagccccagccttgcctggaacccttttgctacctccttccttnncccatncccctgttagaattggcatttttaatagtggtttaatgtaagtatgcatgtattcattgaacttggagaanaatagggtaattaagccgttgctaccatatggctttgaaagttgaacttaatatgcgtgtgcttggatatatgttgtttgggtgttgcatgtcttcgttaattgaccaaatgttgtggttgtgtgctgtcttcttatatatgattcttgagggatatgaganaaaagatggaaatttcaatttcaattactagtgtcttagactctatcattgagtctatactgagagatgacttagtgtatttatattaatcccat

SEQ ID NO: 299146 - DNA, 472 bp, Glycine max
  unsure (1)..(472): unsure at all n locations
aggggagctgtaaccttttgtaaaacaangncgattncgagcncgncccccgnggannccctaaagnggacctgcaggcaggcaacccttttttttacactncaaccangccnnngcgcgcgacgagtgctacagncttcattccttccttcactttggttccttccttcttcttacacaaattttgttggtcttccactgatgatgatcatggaaggctaaacactcaatcaatccaaggatccactccaagaaaggttgaatntgagctctggtttagtatttcaattacgtgtgaatgtacatctttttcttcaatcatattttttattttcatgattatgaatatgcttaggattgaaaacaaaattaagctatggaatcattgtgtaatctgaaatctaatcacagaatgtttggacgatattccaacctaatttgcgacctcaatgaattaaggattaattcaacg

SEQ ID NO: 299147 - DNA, 397 bp, Glycine max
  unsure (1)..(397): unsure at all n locations
gccgtatanngttttngacntcnnnnntagnnacnnccaagnnnnnttttgaagaccccnttttttgttaaaccccaccactttccggggatactcacaaatctccccttgaattgataaagctttctaaagaaattgatactctgtagtcctgaattatcctattccttccccttgggataacaaaagccaaggcgtatagatttgaggatcataataactaacgtcatacacattgtggagaactataaccaatcatgaaccggaccgtgagccacatcataatagatatctctatataccataggcgaaacatattaattttgtccacatccatgcaatatggaaattaaatgaaaatccatatattagccaatacatgctaaatcatgtctag

SEQ ID NO: 299148 - DNA, 465 bp, Glycine max
  unsure (1)..(465): unsure at all n locations
aaattattttgcttgatcttaaagcaattcagcccggacccgcgagatcctatagaggacgacctgcgcgcgcgcacacnnttttttccanagcaccctctcgagaggagaagccaacttcttatcatagctccatactctaaatagatgggtgcctccgtctgatggcaaacctactcccatactcggctattggatataatgactcccaagtagagatgggacacagctagaacgagaatgccactaaggttctcatgagcccttacgagagatttcgggcccaagggctaagtatgagcccacttatctgtggccatacgagatcaagggttaaatatatctgggcctcggatttacggctacattatgtacgcaaggtaccccttgaaagtaagaaacctcaaccacttgatatacggcccctagaacagaggtccgatatgggtacaacgaacaatcccg

SEQ ID NO: 299149 - DNA, 484 bp, Glycine max
  unsure (1)..(484): unsure at all n locations
ggcgtttggcttttngttctaanctngttaanaacnangcggggacaaaggacagggccccgtcaacacatttgcttgttgtgcacncncaannnccgggaggggacgccgcgnacacacccncacacaccaagnaccancngcccgnnaagggcgncagcccacaaatccactgaaacaaagactcgagcggccatctcanggataccatgtgatatgagaaatgcctttttcgtgggtagtgttcctacgtaacagttgaacctagttctgcagccctccatatttaacacacttattgagaagatctaccgtctgctcatcgttgggaaaggatgataggagaagtcatcaattcacatcctgtaatctgatttgttaataaaactaataaattactatattctaactaatacaacaatattattcgagattatcatgcttctctcttgcggttcaatggcataaaatccgcttgctcccg

SEQ ID NO: 299150 - DNA, 324 bp, Glycine max
  unsure (1)..(324): unsure at all n locations
agctttttatctttcattggtgtanttttatccgcttttggtgctctaaattgtgggaatgtgctcanatatgtggtgcaattttggtttgttttcttgcttgattgggttgaattgngggtttgtatgagatggccctatgcctataatgcattttgaagcaatgggacatgccacattgtccccgttctcttgctattaatgcctaaacgcgcgcccaccaagtgttcggtgaaatgcctcaatggcattaacgcgtgattttcctanggaaacaacccatggggcattttggtttccacatattttctattttttgggaca

SEQ ID NO: 299151 - DNA, 369 bp, Glycine max
  unsure (1)..(369): unsure at all n locations
accccctgtgccctccgtttgatttaagccaagcccctacttttgaggggcaactcctaccttatgaagactatcccgggcaagacgatggngaaggagatacccatcttggccccctgctccacctcanagatccatccccgcatgaactaccccagctgaacatagtccgccatatcccggcctcatccgcacccgtaaaagaatctattccctttgcggaagataagggaaagattgaagcgctcgaagagaggttaagagcagtcgagggcctcggtaattacccattctcagatttggcagatntatgtcttatgcccaacatcgtcatcccttccaaattcaaagtactagactnntgatagt

SEQ ID NO: 299152 - DNA, 297 bp, Glycine max
  unsure (1)..(297): unsure at all n locations
agcttttagaggatgctttaatgaagganaagaaagagagatagtgggagcacgaaatggaaggaatataagagggagagaagtggaactttgaagtgtctcataagactttcattcatcaaagttacaacaagtgttacacatgcttctatttatagactangtagcttccttgagaagctntcttgagaaaacttcctttataagctaaagcttagctacacacacnccctcttaaagctaagctcaccttcttgagaagcttncttgagaaactagagcttagctacacacacc

SEQ ID NO: 299153 - DNA, 510 bp, Glycine max
  unsure (1)..(510): unsure at all n locations
nnntttacttttngcttgatantgcggccactctatagantaccctcgctnggtgaaatgccacattcatggtcattgtcggagnaaatgcatganttataaatcttggccatatgcncagacgcgtgtctcgtagaagcatatccattgggatataatgatgaaactatgtgcattnttcaggtagagaaagacggctagagttttgaattgccacaaagtagcaggttccggctaagcgcatatacatcactatgcgcgagatcagtgcgctaagcgcaggatgtgccttcagccaatgtaagctcgagactggcgctaagcccaatttcacttacttgcgctgagcgngagggtggcgcttagcgcagcgtcacgagttcagagcctatntaaagcctgtcttgtgcagaatagggtacacaccttttatgtcatcttctacacacttgtcacgacgaccagggcacagaattcatagcccgcatacggctatttggagaaaaagcg

SEQ ID NO: 299154 - DNA, 173 bp, Glycine max
agcttttgttagatgccccagctaccggaaaaagcggctttgacgactccaagagaggctatagagacattgaaaatccgacctctaatgctgatgaatttctaaatgatagaatcatggctccgtcttgaagactattgacagtccatactcaagatggtctcttagcccaa

SEQ ID NO: 299155 - DNA, 459 bp, Glycine max
  unsure (1)..(459): unsure at all n locations
nccttaccagggttagnagctgtgctgcgcctctatagantaccctgcctgagactggggcgaaggcccattgccgttaccncngcttattcacttttcggagaccaaaaccctattgagagtctatcttgtgcagaattagggaaccacctttaccacttttatgacaacttctacagacaaccagggcccagaagtttgaaagcagccaccggcctattgggggaaaagagccctagaagcagatatatgagcagcttgtgcattgaagcctacgttttgcattctgaaaaaatattggtagagaggactgtatatgctgataaaggaggggaatccccttcttggaaaggactatcatctttgttttatctattattgtaaggtttttgtatggtcgctaacaccctatgacgattgctatgacactaatgaaacctatatctatgatgggtcatg

SEQ ID NO: 299156 - DNA, 361 bp, Glycine max
  unsure (1)..(361): unsure at all n locations
agctgtgttactcccagaagactgnaagngtgctactggtgcaatttgttttaactgttaatcaatttgtgttttatgcgttgataaataaatataaataatggataacatttctcaatgatcttgtagtgcccttgttttgctgtgtagctttattatccactggctagtacaaaaacaccatcttgcatgcatgcttggatgggcgctggcaacattaattttataaacctatttctagttaaaattaattctaaagtgatatgatgtatatttaaatatttttattataaaactaagaagctaagtgtataaaactcaattaattctggacgtacacaatcaattttaaactctttta

SEQ ID NO: 299157 - DNA, 228 bp, Glycine max
  unsure (1)..(228): unsure at all n locations
tttttataaaaaaaaaaccggaaaaggaattataaaagggaaatgaaagatataaattaatagagaaagttggtggtttgccattagaattaaaagggaattttggagattntattttattttttggaatttgaaaaaattaaaaaacattgttaaaaaaaaaagttaacgaaatcaaatgataatatttacggagaggcaatgcgattttttgatatagccttatct

SEQ ID NO: 299158 - DNA, 403 bp, Glycine max
  unsure (1)..(403): unsure at all n locations
agggagtacgatgtatctccgnatttaaaagncccgggacttaagggacctctggaggcccgtttgatccanccgaaaaaacgggcgtgtatgagaaactcgacatacccacacggcaagcaaccatgaatggcaacatgggtcccagaatatacttgaaagccggtggatagagtccaccgcacatacagcccagggaagcttactaacaagccacgctatgacacgaagcaatggtatttatgacaaaacaccctgcctctactatgttagcgaaattcctgatgtccttatcgcaagatgatccgtaaggtacagcgcaagagacattaggtttcctaatacacaataagtgggagcgccctcaattcgtaagggagacagttggtggcacattatttcc

SEQ ID NO: 299159 - DNA, 490 bp, Glycine max
  unsure (1)..(490): unsure at all n locations
nttcttttnnggatccccnngntgcntcgngtnanttanacnaccncactcttgcgagcgagctgttgagacacacacaaccggttagtcagtttttgacaccccaggcgccaggaggagagcgcaacaccaaaggagacaagacacacncaggcccgacgaaggggaaggagatagcgctcgcggcacccgggtccacgagcacaaagagcggccgggcgaggagcacagaagaacagagccgcgccaaaactcgacgctccgcccccgaagaaaaatccatcgcgggagacacaccacagggagggactcacgcggatcgccagacgatagtaacaactgtgacgatcgccctaaccatgatgacaaacgtccccccgagatcaagtcccatcaccatcggaacgacaaggaatcagctgtgaacaactggacctacaaatggccgacatgaaacatacagctctatacgatgagagacacatgcggg

SEQ ID NO: 299160 - DNA, 238 bp, Glycine max
  unsure (1)..(238): unsure at all n locations
agcttttagccaaaatcctgactcaccataaaccttgacccagggtgagaatgtcaatccttaccctcggaagcgaanagaatagaagggaaatttccaatcaaagaaaaggaaagaaggaagatttccaatcaaagagaaagccaaaaaagaaaagattgaaaattcccaatcaaagagtgggagaaagcaaaaagataagaaagaaaattcccaatcaaagaatgggagaaagtaa

SEQ ID NO: 299161 - DNA, 220 bp, Glycine max
tgccaactcatatgagggataaacacataagatcagtcctgagaaaaaatgtatcattactgatacacaccaatccatgtcatgaaaagaaatgtatacggatatactatcaaatatgattgcatcccaatttatacaaatggttgtgtttcttttgatatatgaaagaaactttgatcacgctttctggatctacaatcagatggacggtataaactta

SEQ ID NO: 299162 - DNA, 316 bp, Glycine max
  unsure (1)..(316): unsure at all n locations
agcttgttattatccaaattctcagagatattactcaccatgagaatgagatcactnttaataacttcatcttggttaatttcaccatcaatttgtaatattgatcccataatatacttaaaaactggtggtatgatatccacccaacagtcacacaatgtttttttactagtaattctgtcaatgatatgagcaattnttcttattagaatagaccttgactctactattatagcgaaatttctgtaatttcttttcaaaatatgaacctaaattaaaagagaaagaaaaaataaatatatttattatacaaaaa

SEQ ID NO: 299163 - DNA, 424 bp, Glycine max
  unsure (1)..(424): unsure at all n locations
tgttcgcacatcgttcgcgtgtatgatattcactccacaattttttaatataagaaaaccttcaatcctataacgcacgtggcgacaaaatgggcataactgaatggcattattgcaatgcggaaggtattctgcgcttcactatccatgttcacacattatngcagcttgtggttacgtgagcatgaactactaccaatatatagatgttgtttacacgaatgagcacatcttaaaagcatactccgcacagtggtggcctcttgggaatgaagcggcaattcctccttctgatgaggcatggacattaatccctgacccaactacaattcgtgcaaaaggtcggccaaaatcaacaaggataaggaatgagatggattgngtcgaaccatctgaccaccgacanaaatgtagtagatgtgga

SEQ ID NO: 299164 - DNA, 350 bp, Glycine max
  unsure (1)..(350): unsure at all n locations
accttatctaggttggacctcggctggagttgaatacgtaaggctggagtttggctcattgcctgtcataggtttttnttaaagctcggctcggtttacataaaagtctggctttgcccacgagcctatttaaaaacttgcttaaagacgtctttgattaattaattattttaaaatctagtgaaatactaacttaaaaaagaaacttataaaatttcgtataagcaatgtacaaattcaaaaataattggataacaaaatcatattgaattcaagtcgttaaagtacaaagtatatcaaaagaaaataaaaagagcataatattaaaaaatgtatggattagagatgat

SEQ ID NO: 299165 - DNA, 233 bp, Glycine max
gactgatcgttgccctttctctgcgctaaacaaacagagaacgtcgctgcaagacagccccgtatcctttgtattcgcaggtttcttttactaatttgttggcttaaaaagaaaattataataaataataagtcgacgcctaaattctaacttaagtaagttcaagttaggcaagacgctaacccatgagaaaggaggggacatggttaatgttccccttcagaaaaaaaaat

SEQ ID NO: 299166 - DNA, 286 bp, Glycine max
  unsure (1)..(286): unsure at all n locations
aataactattttaaaatgataatttagacaaaaaattaacaaaatcatttggattatctcccaatctcacctaatacatacttcaggcggtagctgcgttgggatggactgtgaatatatagtccgtgcctgcgtaaataagattgcccgtggccttcctttagctacgggcganacagttttatggtgttaacctttctattatcccatcccaaatgcttagacatttaagacaagccgatctacatattaggaaaataacaaatgtcatcatcataaaaaaaaa

SEQ ID NO: 299167 - DNA, 439 bp, Glycine max
  unsure (1)..(439): unsure at all n locations
nggagtgtgttcatgagaacgcacccaanaaactcagcctngctgtgagtccccagaagatttaattggcgaccatttattatttttaaaggaccataaaaaatgtaggagtctatctttcaatcttctctcaacatcattcaatatctttcaactgtttctacaaaaatatcttgaatcattcctcttcatcttccaaaaagtcttggttcaacactttcttttccaaaacaagtctttgtcaaaaactcgtgctatcatattttcattctcgtcttctttcccaaagacaaagactaaccgctgattctttgtgctctctcttcttacaaagatcaaggacaaccgctgaaatctttgttcttccttccctagcaaagattcaaagctaaccgctgaatactttgttcccttacaagattcaaggataccgctgaaa

SEQ ID NO: 299168 - DNA, 365 bp, Glycine max
  unsure (1)..(365): unsure at all n locations
agctttgttcttgacanaaaataacattttgaatggtgttaatatatataccagtttactaatgtatatatacttgttttttttaatatgagtacgttaacaaattatacctagatattatcttacaataaaccaataatataacttattaacacacttaaaatacaccaataatatacctagatattttaattaatatataaatagagttatattattattattaataaatactccaatatttctatgataaaagcacatgcactttgataatgaaaaattacctttcttataaaatatgatggttctatgaatctagcatactatgaataatatataaagttttttaattcataaatatcaaa

SEQ ID NO: 299169 - DNA, 442 bp, Glycine max
  unsure (1)..(442): unsure at all n locations
aacatctggaccttaggtgccatttttagagtaaaattttaagttaattttgggggatnaaaaccattcttagagtccaaattaaaaattaaaaattcaaatcacaatttgtggttgtacacaaccaccacacacgttccagggcaaaaaattcaaatggaggccccatttgtggcttaaacaacgggtgtgcgtggcaaattcaatggtatcactgacaacccatcatagtcccccacgcatcttcaagagctttcaatanggacanatttangctccaaattgcaagtccacccccgcaaagccctcaccctacaccctcacagatctggttgtcgatgtagaggcatccatcggaggaaaggcagtggtgcacaatgtcanggttgagccaataaaggatgtggaaggccgacttgatgaagaggaagtcatcgtcaat

SEQ ID NO: 299170 - DNA, 222 bp, Glycine max
agcttttaattttaatacggacatcaaaacagagcagtgcattaccaatttaagtactacccaccaccaagcaaagctatgttgaagatatacttttgtaactacataatattttattttttcagtttttacaataggatttagtaaataagttggtgtcctatattttaagagtaagtcagttctaatggattagcttagtcaaaaagtggttcctatctt

SEQ ID NO: 299171 - DNA, 209 bp, Glycine max
ggcccgctatgtaactaggttctatctactgcaactgctattatcccaaatctttattggattttatataagcaaatgaagtgtgaggaaaagtaaaaattggatcataaagaagaaaaaattgtgaattagttgtacatacttttgaattttgcactatttacgagtacttaaagacaatattacttatataatgattatctaaacag

SEQ ID NO: 299172 - DNA, 179 bp, Glycine max
ctgagtaggctgctgtatgagatctctcagaaggactgaatgcttgggcacagaatctactacccatagtcttgggcaaagtggaaacccccaatccacggatttggatatgcagcttagtggacaaggatagacaatatagctactttcttttttaatatacctatgtcattattgct

SEQ ID NO: 299173 - DNA, 493 bp, Glycine max
  unsure (1)..(493): unsure at all n locations
naacaggaattttagtnantgcgaactatagaaacacaacccggggggatatcactcgcgggtacgaacgaaccgcagcgatttgctattcattcgccacccactgacgagagcgggttgatgaggccaaaagcctgagagctacggagcggcccctgccgtagacacagaaagcaacccttggagttgctgatgctgagacaagagcagcaactcccacgtcactggaagcagcactcgagcctctaaactcagcatgaccagacaaaacgacgcgcgtcaagaccaggagaagagaacctggagcagtgtcatcctcagtgagacaagacgaaggggaggtgctgcccgttataagagcacgagatgcctaacgaaacgagacattagaagccacaatgccgacagcgggggaatgatattcatgtgccaagaccaagttcggagtcaacatgtctggatggaccagctacgagataacttccctccgcgn

SEQ ID NO: 299174 - DNA, 303 bp, Glycine max
  unsure (1)..(303): unsure at all n locations
agcttatatgaacaaaattgccttaatcattccaaatatgcatgtgaattangacgcatcaacaagaatcaagccaaggctattgtgcaagcaatcaatggggcaaaacacacccaatgattataatgatggatggctcanattctcacaaaggtaaaatcatcactttcaaattgagctttcaaaactatcatgacatgtagagaagaatcaaggatttcaagtcacaaaatgtcaagaacttttattttcaaaacaattacccatttcttgaacatatcctataattcaaagaaaaacatg

SEQ ID NO: 299175 - DNA, 134 bp, Glycine max
  unsure (1)..(134): unsure at all n locations
ntgtcctcagatcccattggtgggactaggctcaatttagtcggttctcctatgnttagactaacttanactaagcttcatcctcagatcccatttgttggactagacttagcttaaatagcttatgaaatttt

SEQ ID NO: 299176 - DNA, 244 bp, Glycine max
  unsure (1)..(244): unsure at all n locations
agctngtgaaccgatatatcgataatattttagatcgaaagatccttccggaaaggaatgtaaaactttatcattctgaatttgacgagtttaaaatagaattagagaggcgaaacctgcacaaacgtctcgccaaccttcaggaaggaagcatagatgtggcagtggttaaggaattttatgccaatttctatagtccagcaaatcaagctcctanatatgctaaaacaagaagccatttaat

SEQ ID NO: 299177 - DNA, 432 bp, Glycine max
  unsure (1)..(432): unsure at all n locations
ggctcaactacaaccttatcgaggccctcaaacactattcgtgnctcccacttccagctntgtttactattccatcgaccgacagaaccaaggggatgaactccaatcttcggtcgacggaggagtgagctctacaacanagtcaatgagcacctagtccttgatggcacctcttttttcaaagatgatgccatacttggacaattcgatcaaccacttcaccatccttcctcccaaatagggtttttacagaatttttcagattggctgatccatttggatgactactgggaaactctaaaagtaatgttgcaatctctggacgtgattagcattgccaagaccattntgtctaactcttgataatgcgactcaacaccccacaaaacatggctgatgaagatgttgaagaaatagagcagcacactcagt

SEQ ID NO: 299178 - DNA, 240 bp, Glycine max
  unsure (1)..(240): unsure at all n locations
agctttttttaccatgagattgtttgaggccttatgtttttcttgatcttgtntacttgaccttaaatacatgttgaagcaatgcttaacctttgaatgtatggtgaactaaccttgtattaatcttaaagcaatgcttaacctttgaatgcttgttgaaccaaccttgtatgaacctacattggcatcatcagaaccctgtatacatacattcacaataggtacccgactacgtgtatt

SEQ ID NO: 299179 - DNA, 426 bp, Glycine max
  unsure (1)..(426): unsure at all n locations
gggccgctgccattacgacnacnncncctatnganacncaagccancngcacaaagggcacggatggcacccaagggaatgattaattcagcccccaaaccaaacngaggggacaacacaannacaaaacaaggaccacatgccccgcacgcaaacaaagacagcgcctacgcaaagaaaatagcccgccacggaaagagagacacacaatgcgctggcagagccaggaggcaaggaccaaccaccgaccccccgccactagaccaaaaatatcaagggcacaagcaaggccggccacgaagaacgccccggataacgccccgctcgaggcacaggagcccaagaaaacagctacaaccaaacgcgggctccttggcctaagaggccaaagaagaagccccgccaaaaaccaggacacgctcgacn

SEQ ID NO: 299180 - DNA, 376 bp, Glycine max
  unsure (1)..(376): unsure at all n locations
agcttttattgttcaatttcgagtgtctcgatagaggatgcccctgaatcggacctccgaatgaaaagttatgaccatttgaatttctcgagagctacctttgttcaatntcgtgcgtctcgatatattatgcgcctgaatcggacctccgagtgaaaagttatgaccatttgaatttctcgagagcttccgatgttcaatttcgagcgtcttgatatactatgcgactgaatctaacctccgtgtgaaaagttatgaccatttgaatttctcgagagcctccggtgttcaattttgagcggctctaactgtgatgcgcctgaatcagacatccgagtgaaaagtatggaccattgatttctcgagagctcccgtg

SEQ ID NO: 299181 - DNA, 349 bp, Glycine max
  unsure (1)..(349): unsure at all n locations
tccttgtgttcggactctcagccacttatgatagccgtcgatgatcccattactgcttcccctaagctctctgtcctttcttcacgccgcatcccatgccttgcgaactccttggagtaccctcgcgttgtggtcactganaccccgtgcgatgaaaggcgtgatgctttcgtctaatggcgctcctctcatggggtagccaagctgtcttatggcgagaacgggattataattaatacaaccccttgttcccatcaagggaacatttggacatccttcgcatgaagatagaatcttgattcttccttccttctagcgagggaaccaattaacagaacgccccccatgc

SEQ ID NO: 299182 - DNA, 206 bp, Glycine max
  unsure (1)..(206): unsure at all n locations
agttttattttctgattgnggacctgtggtttgtgcaagcgcgtcaaaagtctacgcaccttgaaatggtcttgatggatgcaaaggtatgttgcgatttagcttttgctttgtttaataatgagatacggattatgctctgctttgctgattgggtgttttgatcccctatattgagttgtaatttatgggatttggttaatcat

SEQ ID NO: 299183 - DNA, 510 bp, Glycine max
  unsure (1)..(510): unsure at all n locations
nnggggcggagggaganannnnnnnnggatccccnnngnatnanactnngnanaananncnnacnnanccnntnanattgcnacatgnngaggttaggacacagtttgcatancttaatatcgcgnangcaaactgggagtctggtgcatactgaaagcccatgaggcccactaaacaaatctaagatagctgatgaatgtgtatactaatgaatccaacgctgggacgtcagatgacaatggatacacgatggtcagaaagacaaaatttggccacatatatgttaagaccatgtcctgcgcacaccctattgaagaggaggttacaagactgcgatcttcaggttctaaggcaagaacgcatttcccagagccatacatacctaaacaggctctcctatggatgatcctaccatgagcctgcggaatttgagcacaganagacacattcatcacaatacacgcactctgttagattttaaagtggtgcgaccttcgttcattgaaatg

SEQ ID NO: 299184 - DNA, 493 bp, Glycine max
  unsure (1)..(493): unsure at all n locations
gaagttccttgattcccaattgtanctccgggntaaagagatttgagaaggtttgtgatttgaacacaangccacggggggttttatataattatcacctcactttaatgctgctatgctcataagtaattgatatgttcaacgttataattgtatacgttgttcatacgttacatctctagtgtatcaaccgcctcgttgataatattagagcatggatgattggtatattgctgttatatatattgctttaccgcttttcggtgtcatggctaaattattacctttcgttgctaaatgcgtaatccgtacagacgatgatctacctctaatgctattatcatgactcgtaactaatattatgaatactatatctcttcgtgtttttcatagatgttcattcattacttacagtacttctcgtcttacaatacgaatttatagccgtactcgtgtttatagtatagtttatacacttctactcatctactcg

SEQ ID NO: 299185 - DNA, 389 bp, Glycine max
  unsure (1)..(389): unsure at all n locations
ggggcgtgaatcatgacatggacnccncnnnnntaganaaanccccggagnangaacgaaagaggggggacgaaggatatttcccccccacgccaaacggggggggagggaaaccaaaccaccccacgacaaacacgcgcagacaagacggaaccagaaaaaaaagagaacggggcgaaccagccgacgcacccagcgaagcgccaaaagacaaacgcgaggcccgcacaaagagacgcagcagacccagggggcgcacaggaagaggggcacaacaagagcaaaacccagcacaccggagaccggagcccacgaaaaggccgggacaacgcagcgaaccacgcccacgaagacagcacaagacgccgcacaggaagcgcaagcaggcg

SEQ ID NO: 299186 - DNA, 297 bp, Glycine max
  unsure (1)..(297): unsure at all n locations
ctcatcttgggggagaagctgcttctttcatggcttattccttaatggatggcgcctnctctcacctnctttcctttgtcttccgctgcatcttcatggtggaaaatcaccattaaaggaccccattgaagctcaaagatccagcctccatataagctccacaagcaagcttccatcaagtggtaatcagagcacaagagcttcaagtaggtgctccttaaacctccattaatttnttttctttaccttctcttccattgttggttcttcatttttatccatgtatctcctcacatg

SEQ ID NO: 299187 - DNA, 438 bp, Glycine max
  unsure (1)..(438): unsure at all n locations
cggcgcaagcgctgagacctctgactagnggcngatagtttattttatcgcacatcactacgctgggcgcatcatctttactggaagtaaacttcaagcagtgggcttagtggagatgattgttagtcaatgaatacgactaacttttgtgtaagatatctgtgaaaattgtatctaactcctcccatttatggttatttggtagtgttgtaattaccttttgttaaatataggtcataagtacttagtactcccattttgtgtatttaataatcatttcctttcaatttcaggttaattaggcaagtttgtgaagtgctgaatttgatatgctcgctaagccaatctgtcggcttagcgagccatcccctgagcgcaccacatttgtggattatcgctagacagaatcttgaagaaggatgagcttgaccactcgct

SEQ ID NO: 299188 - DNA, 216 bp, Glycine max
atacacttccttcaaagtgaagtgtgtagcctttctccatcatttggccaatgcttagaagattttcttttaggttggaaactagtaagacaacatggatgaatcgcttacctttatctgtctccaccgttacagtgcctatgcctattgattctaccacactttcattttccagtcgaacttttacttttgacaacttggcaatgcctttgaaaa

SEQ ID NO: 299189 - DNA, 477 bp, Glycine max
  unsure (1)..(477): unsure at all n locations
ggcagaatgatccgtcagatcnancnannnnanaannnacctnccgtagtccttcatcttgttttaaaacacgaaaggagggtanttttattttgatnctanggncggaagtgagggagagaagcttaataaagttacttgacaagagaggcttattaaagtggaatttcaaaattgattcgaaaaaccacacctggctttcaccaaccttaagttattccttgacaatagatgctgtgaaatatcatattgttcgcgaatttcaggaaaccctaattgtttcaaaaaggcgaaaactgccattaaactactaaagaacatgaaaggccttgaggaaatgttcacatttcaaaaagcgacccttatggagggtttcaacatatattgaaatttgatactgaggacaatgtctcaggaggtacgaatccgcttagacatgcgaatgttatgaagttgagcgataaacagtaatacacc

SEQ ID NO: 299190 - DNA, 446 bp, Glycine max
  unsure (1)..(446): unsure at all n locations
aggacgtcgatcacttgtatnacccccaatnttaggataatcnccgggatcctatatagtcgaccatgaaggaggcaagcgttttgttctctttatctaacactaatcctaacgggggcttaaatcccttaaattcctaagctacagctaagtcttctacccaaaagttaagatagaaaaagagaaaaaggatcaaggaacttacttggaccgtgtatgaacgatgcttcaaagtccaaaaaggcccaaagagagttcaaatgcatgatgtgcaaatttctttggagagaaagaatgcacatgcgaagtttctgtactataacaaatttgagaggaactggtggttcactcactttaacacgttggaactttccgttaacgggacatttcgctaatgagcaaaaaatactattggttctaaaccaacttgcttacgaacagggctn

SEQ ID NO: 299191 - DNA, 254 bp, Glycine max
catatgctgacaatagccgagaaacccatgaatctcttctggggcggagaaggtgtctgccatcgccttggccttggctaacaatcggggaagttcttgactcccgttcaatgaaaagcacaccgatccatccacatggttgcctctttgtgtaaagagtcgatccccctcctctaccctcttttccgctatacttgtgcatattcgtccgcatcctatgctcgtggcccgcggtagaccctactctctggtac

SEQ ID NO: 299192 - DNA, 286 bp, Glycine max
aaatcctgactcaccataaaccttgacccagggtgagaatgtcaatccttaccctcggaagcaaaaaaaagaatagaagggaaatttccaatcaaagaaaaagagaaggaaaatttccaatgaaagcaaactaaagaatagaaggaaaattccccaatcaaagagtgggagaaagcacaaagaaaagaaaggaaattcccaatcaaagaatgggaaaaagtttaaaaggaagaagaataaggaaagaaagctcctgatcatggatcgaaggaaaaacagaaaaaat

SEQ ID NO: 299193 - DNA, 487 bp, Glycine max
  unsure (1)..(487): unsure at all n locations
agaagtttagttcatgnagacgncacactatananactaagcttctacctcgaaggnccaatccagccgcatataatatcgagaaccttctaaattaaccaacggaagctctcgagagatcagatggcatanactttacctcggaggtcgattcaggcgcataatatttcagaccctaaattgaacaaggaaagctctcaaaaattccaaatggtcataacttttcacacggatgtctgattcaagcgcataatatatcgagacgctccaaatttaacaacgcgaagctcctcgagaaataccaatggtcataacttttcactgggatgtccgattcacgcgcataatacattgagacgcctcaaattgaacaacggaagctctccaaaaattcaaaggtcataacttttcactcggatgtccgattcacgcgcatcatatatcgagacgctccgaaatgaccacggagcctctcgagatattcaat

SEQ ID NO: 299194 - DNA, 386 bp, Glycine max
  unsure (1)..(386): unsure at all n locations
tantgcacaaccncaagcgncgcccaagggcggggctttcagaancaggacctcccttccaatatgaccaggaccagagccattaccttcgagatgacaattggacttgctcatttcccttcagagaaattgaacccacttataattgaccacagatgatacattgagaagtcattagaatgggaataagcactgcataataaaacttcacactagtattttgggacataaagcacaggcatacatatgattaattcagataacatccaatgtttattgatgtcctcctttgggtgatcacccacacacaacatatgaacatgatgatgctaataaaaatcttgacattatgtgggcaattaatatgccctaactgtaggtgctan

SEQ ID NO: 299195 - DNA, 490 bp, Glycine max
  unsure (1)..(490): unsure at all n locations
gcgatgctatttctttatnnctnncannnanaganacncngcgcagaccaggcaggngggaataacgagccacccccatgatttagttccacgcccccannaaaaaaaggcgcgggagaccacggggacacccacacaaagacccccaangggacacactaccnggaaagacgccncggacccgccaaagaacccaacangggaggacacncacgcaagcgggagccaagaaacaagcgcgggaaaaagcgcgcgaccaacaaagcggcaagaacnggcgcgccaacgcacaggaaggccaccgaaacaganacgggatcaaagggaaacngacagcccgaaggaccaaccacacagaagacggcgangncaacgnganccacgagagggaggccactccagncgccccgcacacagagaaaagacaacgccgacaacgacggcgaggangaagcccattcccccgcacagcaagccgggaagacgagcg

SEQ ID NO: 299196 - DNA, 347 bp, Glycine max
agctttatgccctcaagcagcgcttttcacatgctgcaccattgttccgtgatagcatgcacactttccgcaccaactttttcaatgttattgagtataagtagcatcccatctgtttttttttcatgatgtcaatgaaatgaatatgcatggcatattgacatcagctaatttataggctcaaagaaagtaggaggaggaaaaccaatcaataaatcatttttggaaggctgaatttcacccaaagaaggacctattgttattattaaaaacagaccagaccttactcacttgccaaagctagctcaattgacatcttaatacaccccctaacccaaaatggacat

SEQ ID NO: 299197 - DNA, 483 bp, Glycine max
  unsure (1)..(483): unsure at all n locations
nggacttaggggcttgatntctannnatnganannnacnaccgtngaatatntggataattctgacaggacacgatttattatattgcgactaatgatnanaggagagcgacccaatgagaagccgacactgacggaaaatcagaggaagtccctaattaaacctaaaacaaggaaacaagtgagcaagtctttttttcttagtgtgagggatcaacacgcaacnttttctcttatatatgtctttcttaacccctcaacaaattgtatatcttttaggttattgaaaattgtaatagaacattaagagtatattgtttttacaaaatagaaaaatatattttagcttgcataaataatgggaaactttatagtaaaaatataatactttgaggatataaattctggtggaactctatatatatatatatatatctatatgtatatatagatatatgtatatatatatatatgtatctatatt

SEQ ID NO: 299198 - DNA, 367 bp, Glycine max
  unsure (1)..(367): unsure at all n locations
agctttgtgtaatcgattaaacatatttggtaatcgattaccagtgtttgtttctgaaaaatctaaagatgtaactcttcanaaaggttttgactttntcaaatgggttttaagtttttctaaaaagttataactcttctgaatggtcttcttgatcagacatgaagagtctataaaagcaaggctntgttttgcattttgaatcaatcatttttccaatctttctaacaaactcatacaatcttttacaagccttgaatctcttgaaatttctttgaacttcttcttcttctttgtaccaaaaactttctgaagttttctggttttccaaaccttgaaaacttgtgctattcattcttttcattct

SEQ ID NO: 299199 - DNA, 346 bp, Glycine max
  unsure (1)..(346): unsure at all n locations
gggtannaacgaaatgttgtcaaatacaataaaagtataatttgtttatattntnncctanacaatggaggatgtcttcaagcgtgatccgtgtgccgccttcatcgtgacctgacataaacattgcactctacattgacacccctagtgatccttaaccagtcttgcatgacatcgtgtgctttcgtgccttcagtcactatcctgaggttgagcaaccactccaacctttctgtaattgcttggcaagcctcctatgacattgacaacaacagataaggtattaccatattgcataattaaattaaatgaaattaaaaagtacatgaatttatatgttaccact

SEQ ID NO: 299200 - DNA, 318 bp, Glycine max
aggctgcgactttggtgacccaaacacgctatgggggggagctctcctctaacttgcgccacttgtttcatcgctaataatcaataagaatctcatcacttaattatttaacgtccctgagcattaaaaatattccgaaacattgaattacgctctttttataatcatctctttaaaaactttggaacttagagacagatttaaaataaaattggaaacctgaaaatatttttattactgaattttactactaaattttaaaggtttttttacaaatcaattccatttctaaacatatgttgaaacgatcaattaaat

SEQ ID NO: 299201 - DNA, 374 bp, Glycine max
  unsure (1)..(374): unsure at all n locations
gggtcacccacgacccccannataaaccaccgaccgaaacgagcgagagaaggaagcatatttatcgagccagcccaccagcgagggggggccaggaaacaggacccacaccccgangcggaaagaaccaccgcagaacgcaacagaaagaacgcgcggcaccaagaacacgcagaaacacccgggaaagaccaccgcacncgacggaagccaaagacaccaacccccccaaagaaaaggaacccaancccgaacggccaccgacgaaaacaagagaccaccccacacaaaggccacggagaaggcggggaaaacaaaccaagagacgagcgcccacggacggaaaaagaccgccacggaaacagcaggggacg

SEQ ID NO: 299202 - DNA, 250 bp, Glycine max
  unsure (1)..(250): unsure at all n locations
agctngtgngggtcgtgggcagactcaaaaataatggaatgtgtagtggctttgtcccatacctccattgcagatcagttgtgcctgagcttgcttccctatgtttattaattttgttcatgtttatgaaggaatcgaaactttctgccgaggaccataacgttaaaaaattatgcatatatgaaccaaaataaatgtttaaaactatagggactataaagaaaaattatcacaactatcaggacttaaa

SEQ ID NO: 299203 - DNA, 441 bp, Glycine max
  unsure (1)..(441): unsure at all n locations
agggagaccatttcatgcgatcgtacnnacnnnttagaatagccttcctactaccagctaataattaacgatgcactaagaccattctttacttcttaangcgngnangaatcgaggatcagtatactaagccagactacaatgtaacctggctattattcatactgtggttctaaaaaaagaaagaagagtagatcgccttgcttcatataaaagaaagtacaaagaacactgtcctctgtatttgtgtttttcaatacaaaagaagaagataccctgagaaaactgatcctcctcagtcaccttttttctaccacattaattaattggagcaacaagctgatttcttctccacacaaacagaccactcccctcagggattatgtttacccccacaacataatgcactgcagttaataggggacataataatgtttttct

SEQ ID NO: 299204 - DNA, 289 bp, Glycine max
atggcatgatgcagatatcaccacgtactcaactctgataaggacacttaattgtgcctcttcatgccttagtttgatgcacttggcaataccctcaacaatattcatggaaatcacacaaaggactaagttcaagcctaataatcacttcatgcaatattcttttatccattttgacttcaatgctttatgggaacccaacatcattacatcaccaatagcattccacaagaaaccgcattctaaggtttgatgtaaaataaaaatctaccaataccattcaatttgc

SEQ ID NO: 299205 - DNA, 461 bp, Glycine max
  unsure (1)..(461): unsure at all n locations
nccgggggaattttgnanggattncnnataggnacnncggnganaaaacnatgaagccaaagattaattttttctnancaaanccnnaggggcgggttcagaattaggctgcatactataaaagtatnccccataccgaataatcaaaaataccctcatacctttgagatttaaagcaaacctcttaaaaagtattcaggtatccggctatgccaaatccttgaatgcttagaatccttangcctataaagcctctcaaaagtattcacgtatttgactaggtcgaatacctgagcactcaaatcattaggcttataaagcctctcaaaaaggattcaagatatgggtaagctgaatacctaaactcttagactccttagtcttataaagccctaaaaaatatcatggattcgactaagccgaatagctgacactcanaatcttaggcattatgtcctcat

SEQ ID NO: 299206 - DNA, 240 bp, Glycine max
tgttttacttgagaataaatcacttaatcatatgagtgcttgagctattgcctatctgctctccgactttggcatgaacaaaaagccgagtgcgtaagacatacatgatttagaaaaaaatcgtccacatagcgtccattgtgcaatcagtcataaaagcatctggactaatcatgaagcaggacatgagtaaaccactttaaaatataaaccactactcgtatgacataactcataaat

SEQ ID NO: 299207 - DNA, 461 bp, Glycine max
  unsure (1)..(461): unsure at all n locations
gggactaggtagacatcgaancgnnaanttagatacnatcctatgactngacactcagcagagcaagctttgatcatttccttaacacngncaaaggagagagggagcaataatgaaaaaaacatgacacttgggtccaatgatgcacaacctcacaagtacagggatcagctcaggcatgacacatcaaaggaagcacatccactcagacacacagataagccccccaaatgaaccgcggggttactcccactcgcattcagaaatcacaacaagcacgaaacactaaggtcaaataggctgaaacctgaatgggctggccacacatctgtgcttttctagacatataaaacactcaatgatcaacgagagcaagaaaatgcagttgacataacgggcacttatacctccaaaccattttgtaacaagttccctagagatgaattgacccatcatattcg

SEQ ID NO: 299208 - DNA, 201 bp, Glycine max
  unsure (1)..(201): unsure at all n locations
agttttgatttccttttagnagggaannnatgcggggctaagttggagccaaacccagtttccctcattaagaactagctcatttcttcctctattgcctttaattgaatacacctttgtttggttctctatttggttcttaaccctctcatgcaacttctttacaaactctgacctagatttcccttctttatgtataaa

SEQ ID NO: 299209 - DNA, 233 bp, Glycine max
atgctttgctatcacttggccacctcgtaccatatatgcttacttttggtttaacataactgacacaatgtcacttacttcactaacctgaagccaagctgaattatggagaagggaggaaaaataatcactcaaaatggttcaaaaaaacaatgaccaatatggaacattcatgaaatgaatgctagtgaaagagatgtctataactcaacaatagagaaagtgaagatact

SEQ ID NO: 299210 - DNA, 374 bp, Glycine max
  unsure (1)..(374): unsure at all n locations
ttccagccttttatgccanggttttaatccgaagtccaaacacttccttgtgctttttgacctttgtgaaagtgacctttccagggatattccacggaggcccttctaggctcttctatattggacttttcttgaattcaaatgttagttattcanacgtaatagagacaaatggaatttgaataanacagtacatgtgcactttccttttctgtgatacccagtccttgagagactagacacatgaatttatcgtatgacagtgtgttatatttgtatgaacaagactagatgcttactaaataaagagagctgaacactagattaanatagagcatactctatctagttgtgggcgatattcctttaacata

SEQ ID NO: 299211 - DNA, 399 bp, Glycine max
  unsure (1)..(399): unsure at all n locations
tttaaaactagtcactnaaaattttattatttttgaaagaatcttcaaaaacaagtcacttgaaaattgtgactttggaaagtattttcaaatcagcactggtatcgattacccttaaggtgtaatcgataacacatcaacagatgtgaacttcattttgaattnttgaaaatcttaaacatttaaaacactgggtaatcgattacatgattatgggaactgattacagctttgaaatagtttaaaaaaatgctggtactggaatcgatactactttggtatcataccaagagaacacttggtaaaattgggaaacttatgtctactaatgtttgaaaaagtnttagtacttatcttgattgaagcttctcttgattcttgaatcttgagtcttgaatc

SEQ ID NO: 299212 - DNA, 347 bp, Glycine max
  unsure (1)..(347): unsure at all n locations
agctaattaatgctaaccactaccattgcacatgtctcttaaaccgtgggggaaacacatgaaattccccaccacaatctacccgacttcgacccttgcctcggatatgccactgaagggcaagcagttggtggtatacccctgcaaaacacttttgagggcccctcagtatcacccaaaactacacctcttgcattccacaacaagtaaaaaccctcatgctatggtagaaatgggaaagttggatcatctagaggaaaggctcanggccattgaaggaggtgaagattatgcctttgctaacctagaagagttgttcctagtacccaatatcatcaccccttcca

SEQ ID NO: 299213 - DNA, 489 bp, Glycine max
  unsure (1)..(489): unsure at all n locations
nnncggttctaatactangtnatctancatanaaacacaagcccgccttggttanacatgaatgggacctgaattgggaacttgattatatatttcggccaaaanggaaggagggaaaaagtggttttcaaaatctgcactttatgccgaattttgcttgtgaaatgtgccgcagaattttgtattagtgccaaaaaatgcttggtgattgctggatgtgaaaaggggtatacctatgggggtctggacatttgcctaccgaatccaacgggtaaaaatgagacttatgtactagagacttccaagtaaattttcgagtcgatccaaccgtttacgaattggaacgaaggaaatgttactggtgtatttgtatgtgaaaagctgtgattttgagttgtgttttgggtagagttttctgcctttgccctattttgcttgttttggtagtctatgatgattggatgtgggaatacctcgatgttgtggaag

SEQ ID NO: 299214 - DNA, 368 bp, Glycine max
  unsure (1)..(368): unsure at all n locations
ggagacgacccgaacacagcataaaaccggccccgggacccataaggggccccagggcgcccccccttttgccgaaacccccacaccnccgaagggggggacgaaacacnagcgaaacaccccncccacacaccccacggaagacaacaacaccccagcgcacaccnaacgaggaacaaaagcaggccacccacaggcgagggcaacccacacacgccaagaccgccgaagcgcccaacagaaccaaccaaggcacgacgagaaaggaaaaaaaagcaaccacccaccggaaacaaaagccaacccgggaccagcaagcaaggaaccccacccgccagccaaacagaagaacngcaacacgaaccacc

SEQ ID NO: 299215 - DNA, 412 bp, Glycine max
  unsure (1)..(412): unsure at all n locations
aatttttttttttattcanncnnanaanaacaagggcccnngnnggaggaagcagaaacgnattttttttttggacccgaaacacgggaggggggggaacggaagcacccccctccccggccnnggaacccccacaatacaccaggccatagaaaccccccggtggaaaagcaaatgtctaaaacaaaaatagctttagtcaaaacggaggaaatcgcccctcgaaaaatgagcaactgatagaaggagtttccttccaatcaaagtatttcaagcagttgaggcctgctaacataataacctttaacttgaacgcactgctaggttagcgccccctcctgtacagggtacaagaggttggctcttccctatagcatatcgatcctctatattgtttgacagtaactaagtt

SEQ ID NO: 299216 - DNA, 347 bp, Glycine max
  unsure (1)..(347): unsure at all n locations
gtgctattgagatgggtttaaactttacttcaccagagaagcctaaatgagccttgaaggataacctagtccaaggtcaccagatggaagcttaatagaggagcatgatcgttgattgatgtaagaaagaaggctncttatacatcatgtanggaaagatatgcaaaggggagacgaattntgctcaagatgcccccaaagaattgtgacacaagagatngngtcacatgagtatgaaaggttngggagttctagcaaatgatcactttccanacatanangagcagccacttgaatcctacaaagattgtcttcangtaaacgatcagggtgttttcaaaaattgt

SEQ ID NO: 299217 - DNA, 395 bp, Glycine max
  unsure (1)..(395): unsure at all n locations
cccaaagctacatctccaanaaaaacnccacggggcccaaaaaagaacaaaacagntttttaccaggcgggaaggaacacgggggggggtcgaagaaatatccacacctctccatatccgcaaaacaaaaaaaaagaaggctgaataacaaaccctggccaataactaaaaacacgaaaagaaaacccagccgaagcaataaaaggacacatgacacacgatcaactaaaaaaagcaaagaccatacaggtcacaaaaacctatggtccatcaggcgtgaatacccaacaaattaacccaatcagagacacaacccccaaaagtccgaagtagagcaaaagaaagacctggccagagaagttataggaactaatcaaaaattgggcagacctacg

SEQ ID NO: 299218 - DNA, 337 bp, Glycine max
  unsure (1)..(337): unsure at all n locations
acctnttttgccaatgngctactttcgccaggaaggcatggacaatcgcaacttgtgcaacatgtaaaacacanatgggatggctttttacagccaggaacaaacaactgaaacccagctatttcttgcggattccgagctgtcaacttgcaaaggaaatacgccaaaacctttagtttgatatgtatgcagtcatctatccaaagcttagtgaaagccatgttcaagtaacactgcatggttatgtatataatgcaactttcttgtagcacttcgcatgttggtatacttatattaataaaatatgttgcaacagcttggaagaaattaagtcaca

SEQ ID NO: 299219 - DNA, 451 bp, Glycine max
  unsure (1)..(451): unsure at all n locations
ccgggggattcccgagatnccnnataanaccngcagagcgaactaggcattgcgcccaccttacttttacccccgcccacaaaagcggggaattttcatcaactactccccctcctggagcacgtacaccaagcacccattgttccacacctaacgtccataacgtaaggatttcggagacgaacgttctaatattactgtctcttctcacatactcattgaagtgaatccagtcgatgatttccttcaccacgaactgcatgacgntttccatgcacatcccttcggaccaaacaccagtttgtaccctttcgacacaacctatacttctttaacccgtttcagagcatcgcctacattgagcaaccttgggctctgaagtaaaaaaattcacttgcaacgttcgtgtttgttttcactcttggacactcgagaagacttcctctcgaag

SEQ ID NO: 299220 - DNA, 497 bp, Glycine max
  unsure (1)..(497): unsure at all n locations
ttttnttcccggtttcgnttagcttnctntagngcgattnncgagactcngcccngnccggggtatctctttnagagcgacactctgcagcgctgtcgcacncnntttgnggataanggacgannacacgaacacngcgcgggaggactgtttgtcatgatatggaatacagcatctattcagcatcctgccattctctctatgcgcgtgattcgcagcctgtacatgggatctctcatatacaaggcattgcgacactttctacttgtgaagcccactatgtagctgcaccttcttgcacatgtcatgtcacttcgctaagacgattgttggatgaacttcccttcccgcgcaaagaaagcacaatgatctattttgatgatagatctgcacaacatctttccaagaaatcagtgttcccttaactaactaagcctatcgataccaggtatcattttcatacaccatgccattcccaaagagatagactattgacn

SEQ ID NO: 299221 - DNA, 422 bp, Glycine max
  unsure (1)..(422): unsure at all n locations
ntcattatcgattgttatctaacatnaanaaaaccngcncggaacggacctaccgaaaagagagcaattgaatcagacgacaacnggacaaggcagcgagagagcagnngaacccacccccgcaaanggggccngcaaacccgcgcnaggaaggaagaagctcccacnagcaccggaaaaaagacccaagacaannnagagggaaagaaaaangaaaggcctgagaaaagaacccccaaaaaaagaaagaggggcagcaccatatacaaagggagggagaatgggaccataaatgcaaatgaacagcaagctcaacgcaacgcttacaacataacaacaacagtatattattttaacatacgagttaacctctggccaacaatagagattgactaaaaggagatagacccatagtcgaaaag

SEQ ID NO: 299222 - DNA, 290 bp, Glycine max
  unsure (1)..(290): unsure at all n locations
agcttttattatttttgccagctgcatcanaatgggaaacaactggaggtttttgagtctttgcctcttggcattgattgcatcaactcatgctcaacttcagcttggtttttatgctaataatcgcccaaaagcacagcaaattgctttgaaatttgttcatgaccatatccataatgcttcatcactaccaactgcattaataagaatgcactttcatgactgtttttgtaaggtacgtgcttcaatctttaagcttctgtcatttttacttaacacatacaatgtta

SEQ ID NO: 299223 - DNA, 401 bp, Glycine max
  unsure (1)..(401): unsure at all n locations
acacaaaaaccagcttatcagacaagaagtaaagatattcaagagtttgtttatacgtcctaagcttaaagggttatttatagaaggaatccattgaagtacaaagttggccaaaaattaagtaaaaagttttttcaagaaatttactctcttgtaatcgataccaaaggatgtaatcgattaccagtggccaaaactgatttacgacagctattaacatttgaattcaaaatttgcattgtgtaatcgattgcacatatatggtaatcgattaccagtagtttctgaacgttntaattcaaagtttaaagcttttaatcgattacacacatactgtaatcgattaccagaggagtttttcagaaaacattctcaacagtctcatctttttatctgtttct

SEQ ID NO: 299224 - DNA, 76 bp, Glycine max
  unsure (1)..(76): unsure at all n locations
agctttagcgtgaaactntaacttttcatattctttcaattagatatttttaatattggccttttatttatctttt

SEQ ID NO: 299225 - DNA, 387 bp, Glycine max
  unsure (1)..(387): unsure at all n locations
tatagtttaaatcaaaatagatctttgtataatggtgttattttgtgctctttntatgaatcttcaagagttgtggttaaggatttccccctttcttctaagtcttganaatccttaagaatanttttcgtccactagatacctttttgtttagtaatgccttgacctcctcacaaacaaatgtgtcttgtacatcactagttgaagtggtttccaagaaaaaatcaactaaatgagcttgatgagttttcttaagatccctatgctctctttcaagatgttgaaaacttgtttagttttctataagctttagagacgtgagcatatacagataaaagttgattgtaccctttaattaaatattttctagattcanatattatctct

SEQ ID NO: 299226 - DNA, 456 bp, Glycine max
  unsure (1)..(456): unsure at all n locations
nnnaaagtatctttgtatcgtaccnggntnntagannanncnncccggaggcacnaaaaaggaccctcaagcagcgcgcacncgtttttttatgcgccaaaggaagcccaccagggggggagatattcgttatctaaactctcaaaagtgactgagaccgtgatgaatatagacgagttcgagtcacaatccgaatattactctcgaatatcggccgtagccaggcggcatgaaagaaaggcgcgcaatcttgagaagggatagaacggcaaaaattcttcgactttgctctccaagtctcactgaatggtgcccccctagattgaaacgcagatgttaccaacctgactattgatcaactcatggcgacccttccatcctattgaaacactccaatggacacaacctagacaaatgccgcctcagagcacgacctcggctccacgaaaagaaccn

SEQ ID NO: 299227 - DNA, 452 bp, Glycine max
  unsure (1)..(452): unsure at all n locations
ataagcagtacagaagcanncnatagaaacnccgcgagnncacacgcaagcaagaccaatttattttttgccgcnaacaacagccgaggggaaacacaataaacaaccgactggacacaaagaaacaaaaaaaagacacacggntgtacccctatctgcacagaacaacaacatctaacatagctttactcggaggaacacgaaaccccaagaggacagatggaaactaccctatgatcaacctggagaatatcaatggtgaggagagagagactatgttggaccagaatcaacatgctcgtcagaaccggtgagttttggagggaacccacaaccacaaactgctttacaaaacctttggcatactcactcaaagttatttagagctaggcatccgcaccgtaactgtgcctaaaggtggacatataaangaagacaacgaacggggcgcn

SEQ ID NO: 299228 - DNA, 435 bp, Glycine max
  unsure (1)..(435): unsure at all n locations
aggagtgnnnctgaacacccagtaaccgaccccgggatcccaagacaccagaggcggcaaattttttactggagcacaaggaaacagccgggagngaagaaggggaccaacacacccangggcccaacaggaacacaacgggcgcggagccccagaagcaggaaagagccggccacaccntccacatgtaaagccagacaacttcctccttagcccatgacccacgacatcgcgtgcatccacagatcgcatcccaaatatccgaggcacaaccctttagaccgtaatatgtggcggaaccaggcgagcaagctgagggcgggcccacaaagcgggacctcggactggaacaatagaaaggcggtatggcacaccactagcctctatcgacagccactcatgacacatgtgcgccggcctgcgcaccttgcgacg

SEQ ID NO: 299229 - DNA, 480 bp, Glycine max
  unsure (1)..(480): unsure at all n locations
agggatantctgaatcttganncnnnnnnnnnnnccgaggnngcnncagggntgggggagaaanctttnatacaattcccaccnggnganacccaccaggagggntttcatatgaagcatacatcactggggggtataattccaccttattgaaaaatttaatctgcataatatcacttgtgctcaatttcttgtgaccaagtaacattgcacaatccatttcatccaacatgtcatggttgtggccaaagcaacatattgtacataccaatgatcgttactaaagttaacgtgaccatgaaacctagcattgcaaccaccttgtatcatgttttcctcacgcttcctagttgtcaatgtcagaccactatcatctcaatatccaacatgagagcanataaaaaagttgctgtaatgttntccctattatgaatctcataacagtacttttacggacaaaggtaccattatatctagctg

SEQ ID NO: 299230 - DNA, 141 bp, Glycine max
agcttttctgttaattcatctctgttaatggaaacgatgcttattaagggagtagttgaaaacaccctgtatatcactagaccctgtgaatgaagtgaattttatgcatgttaaagtcttcttatttttttttgaaaaaca

SEQ ID NO: 299231 - DNA, 349 bp, Glycine max
  unsure (1)..(349): unsure at all n locations
tctttnggaccttgaacaagcaattaactcctcttttagattcatgctatgngctcgcgactggtctctgtcttcccttcgcaacttgagttcactattgctaccccatagagctccgcgaaatatgttccggccatactcttccttgtgagccctcttggtctcttgttcaagggctcttgcagtaattgcattctcttcccgtaacccggcacactccttccgaacgtgtgtagcggccaacttgaacttctccttggcaagtattgcctttcctaactctcttttgagagtttggacttcttcgtcctcttccggtgcttcaaaactctcttcgctgacgactttt

SEQ ID NO: 299232 - DNA, 157 bp, Glycine max
  unsure (1)..(157): unsure at all n locations
atctatcataccttctctccatattanctgagtccttcataaaaatattggagaataagctgttctgaaatctgatggtgggggcaactggcacatagtttcttaaatctcttccagtactcattcaggctctctccactgagtngtctaatacctg

SEQ ID NO: 299233 - DNA, 380 bp, Glycine max
  unsure (1)..(380): unsure at all n locations
tctttgtgggttgatgaactctatcgcacatattgtcttgatcattgctgacatattctcaattaggtcagttgcctcttcaggaatctttaacttttatttttccccctgctgaagcatctagcagttgctttggtttgtggtctcagtccctctataaacatattcaattgagttggctcagagaacccatgggtgggagtctttctcaataaacctctatacctctccaacgcttcactcaaggactcgtcanggaactgatgaaatgaagagatagcagctntcccttctgtagtctttgactttgggaaatatttcttcagaaacttttcaacaacctcttcctaaggtttcagactgttacctttaaatgagtg

SEQ ID NO: 299234 - DNA, 300 bp, Glycine max
  unsure (1)..(300): unsure at all n locations
attccaaccttttttggtggttaagttctggatattatcctttccacccattctgaaaatcattccatttcttgataatgccctaaaatagaaattcacatcagaaaaactgtgaccatgatggtaaacgtcaacagagatcatcaccttctagattctgtatgtatatactccttttggctcgatataacaaaaaatactaattaagttggtagaatattaattatccaattcatttaaagataacccttttcataattatcttcttgnacttgattcagaataaagatgcttggaaca

SEQ ID NO: 299235 - DNA, 481 bp, Glycine max
  unsure (1)..(481): unsure at all n locations
nnaaagacaagcgttcaagnagnatcttcacaccatanantactcaagcctntanaaagcatgcaaatggaggaaggagaggagcatctggatatatgttgtttctactcatgaggtattctagattaaagaataccttgatcctcaactagttgccaagaaaattctcataaacctacatgatattatattttttgttatatgccctacattaaaaatagcccttagtgcattgttagtttgggggtttgactgtaaattattttggtgtccttttgttgagttgactgaacgaaaatggagaagagcactacacagaggagcangatgaacagaatggagaggaatgaagccaagatgaggcagttgtagtggatcagattctacgatggtgcatactcgtaatggtacaggctgacaaagtgggtcgaatatgaagagcccgtcagctaagcattggtggggggtgaaacaaaattgt

SEQ ID NO: 299236 - DNA, 325 bp, Glycine max
  unsure (1)..(325): unsure at all n locations
cggggacccttatccannaannaaccgctcaccctccatnagtcntttaccaatggaccatatgtcaaacaaacggctcttgtgaataattgttnggacccggtgtacagggagggcttgttgcaggacaagattattgctatctatgtcaacattaacaatcaatgattttttggacaaatatcaagcggactgaaaacaaaacagggttaatgaataaaagaggactttatcgatcctcttttaatcttcataattgtggcactatgcattggacccaaataaaaatcttaattttagtatggcctaccaaaatagtataccg

SEQ ID NO: 299237 - DNA, 180 bp, Glycine max
atatgcacatagaggtcatacagcaatcatagaaccaaacttagaccaagcatcatacaaatgagtaaaaatatacctcgaatgctgtcacaataatcacagccagaaagaatgcataagtcaataaaattggtccatggtcatatttagctcctccaaaatctgaaaccaaataaatac

SEQ ID NO: 299238 - DNA, 237 bp, Glycine max
  unsure (1)..(237): unsure at all n locations
tggtttccaatttttctgatgccacaggtcgggatatggataagattataaaaggaagggttgaaaaatctgaaaaggggggcaaaatgggttgctttaaatttgtagtggcctccagctgcaacatgctgttaatgtgccattgcactgttataacatatgcatgataactacaagtaaaagtcttgctttatttaaaccttttngtggtaaatctgcttattagaactcaatatg

SEQ ID NO: 299239 - DNA, 492 bp, Glycine max
  unsure (1)..(492): unsure at all n locations
gcgcgatattctgtanttcaacacaanaaacnaagcngggaggaactngaggcgaaaaacccagggaccgtcatttttttacacggaaccacaccaggnggggaatgggatacaatattttacatcgagacggacacatttggggatactaggcgattcaggtatactaaatattaaaaatcgaattagttgaacttttaatttcttaattaaatccttgtggaagagacgaataggcctttctttggagtatgataatcactgaacctgtgagtcactatctttataagattcgacagtcacatactcaatatgatatattctcatactattaagtgattatatttatgcctctagtgatgatgtggtaatgagcatacatgcatcatgcagattacatgcatgcacgcgtgtaaataataatggaacgtgccatgtgtcatgtgcttgcttctgtcgagttctgaaatcagacattatataaagttgctn

SEQ ID NO: 299240 - DNA, 413 bp, Glycine max
  unsure (1)..(413): unsure at all n locations
aggggacctgactcgcgatcgagccgacggggatctcaaggcaccgaagcagcacngtgccaaagcccncacgcnccccgagagggatcggacaaaaaaaacccgccacgaaacgacctaggctataaaagaaagtacaacaaacacgggaggcaacgacaacgacacacaaaaatgacaaacgcaccggggaggggaacaaaccgacggggaatccagctaagaagcagcgggacgcccatcatccagcaaccaagctctgcaccatagaagcaaactgaccaacggaaaaacgcaggcaccacctggggggaaaacaacgaccgacaaggctgaaccgcaaaacaagccagaacaacaacacaacccaggccggccacagaagaggcggaagaaacgcgcccatacaggcc

SEQ ID NO: 299241 - DNA, 303 bp, Glycine max
  unsure (1)..(303): unsure at all n locations
atatgaacggtataagatattataccaaataatttttgtttggttaggaaccttataaaatagttaaaaaaaaaggaaacctgattataaaaaaaagatatgatttttgtataggaacctaatagcatatgatttttgtatagaaacataataggataggataaaatatgatntttatttgctctagaatacagaaacggtatgaaagaaaaaagaaatctaataggaatagaaaaaggattaacatanganaactaataaaaataatgagaaatataaaggaacaccggactcacatcttgt

SEQ ID NO: 299242 - DNA, 223 bp, Glycine max
  unsure (1)..(223): unsure at all n locations
tatggggacccatcacatgtggcctaggtggcggtcggcaatggtcacaacaagtgttccacatccacaatgcgcgcataaacccaccatcccctgttgcccacgtcaactgagctcacgtactcccacgtagcccatatncctcgttctctcaacaccgggtccccatcaatccttccaagcttncacaacatccaagccaaacaacattcacacagcacaa

SEQ ID NO: 299243 - DNA, 460 bp, Glycine max
  unsure (1)..(460): unsure at all n locations
gggtgctganccatgagactactgcacnccnattngnnaacnaccctgtgtggttgcgcccggcactacacgccgtgccctttgtttaatttgaatccaagccccatcctttcggggggcaatgcccctctcattacctctatcccgggcaagacgatgaggatggagatacccatcttggccgcctgctccacctcaaagatccgtcccccatgaactaccccaacgaacatagtccggcctatcccggcctcacgctaacccgataaagaatatgatcccttcgctgaagatagggagagatcgaggcgcttgagagaggttaaaccagtcggggccttgcaataccgatatatgcctactcattacgatggcgccacaatcaattcatccagttcaaggccggcttgtattacaaaggacactgtcgatgggctcttcgatgtttgcgaagatgggg

SEQ ID NO: 299244 - DNA, 349 bp, Glycine max
  unsure (1)..(349): unsure at all n locations
naagcttttgtttggtcctatggcatngnngnnggcatccttggatacatttcttagtggataatnttggtcctatagaagaaataataaaacaattcggagatattcttgcattgtatatcccccctgctgctgtgtacagagatccatattctattcaggtgtttgaattttagaccctctataaataagatttttcatcatatcagttntctaatgtactaaatatagagaagaaattgctctgtttttgccatttaatttatagaaaacatttaatcttctcaaaggggagtaattggaaagaatgggttgcctaatttctacaaaggctgataactttttttct

SEQ ID NO: 299245 - DNA, 307 bp, Glycine max
  unsure (1)..(307): unsure at all n locations
catcaacagcactgacccaattattttgtatagaagggtcctcctccttccgcggagccacagcccttgcgtactcaatttccaatatcctttcctataattgattattcaaaactgttagctataatgctatgacatcataacacgtagtaacaatggtttgtttcctatgttaagaaataaagattagagaaattgataagttattggttgtatacccaatttcaatccctggaatttcaacaacttccttgtaagtgactaaatggcataaggttgtagatcattcngtttcacatgattgaaa

SEQ ID NO: 299246 - DNA, 320 bp, Glycine max
agcttattatatgatgcagcatatttaacagttttcataggtgatataagagcatttcacaacgaacatcatcttttttctctagattctcaaactcataattctcattttgaaatttgttgagtgcttccagaacttcatccatagaaagacttaattcattgtctccttgcacacaccgaaaggccaaccctgctactgaagttagtatccttttaactacttggtctgactcaaacccaaaggatgggtctacaagctcactaagctttactttttgcacctttttcatggcaagatttgccaagtagcttcatctc

SEQ ID NO: 299247 - DNA, 428 bp, Glycine max
  unsure (1)..(428): unsure at all n locations
nnccccggactaacgtccgtcntacggacactatagatactcagcttgagctggagaaaactggaggaggtttgggttttacttgctttctccctgagtgacattgtattggtggtatatgagtgttcatctagaatttttgtgcatctgcatcatatgaatagtgagacaaaattttctaagtagaaaagttctcagaagcgaaactctctatttaattgattacaccctatcgtgattgttacccaagtgtctgagcttgcggagtatgtctataccgtttaatcgatatagcctctcgaatcgatacaaattgtgatgaacaatgctgactattcaagagttctctttatcgataccatggaatattgacactctcttcatagcagtcaaactccagtgtctatctcataccttgcactacatcc

SEQ ID NO: 299248 - DNA, 276 bp, Glycine max
  unsure (1)..(276): unsure at all n locations
agctttaacctttggccatcatttctgccccaaggcgtgaaaggagagcattttcggcgtcgtgaagtgcgtggctacgagtgggacttcgaatattcaggtttgggtggacttctttctctcttaaatttcgtgggtatggggttntgggagatatgatgggtagtcttgctaggtttctgctgtatgatgattatttgtgaagaaatttgttgaaagcttggtgaaatcgccatgttggatgagttaaacatacccatttctgtttaaggtttt

SEQ ID NO: 299249 - DNA, 400 bp, Glycine max
  unsure (1)..(400): unsure at all n locations
tgcgtagcccaccatcttttcatagnagagttatttatttgtgtctaccatcacgatcatcggctccctttccatcattgngggtaccacctgngccgccagatccctccaccttttgggcgtgttctttgaaagatccgtccccctttttgcaaatgttctgtaattgcatcctatccggaaccatatcaaaattgtactgatactgcctaacaaaggcaaccattangtccttccaagaatggactcgggaagattccaagttagtgtaccaggtaacagctaccccagtaagactttcttggaaggaatgtattagcaattcctcatcttttgcgtattcccccatcttctgacaatacatctttagatggttcttgggacaagtagtccccttgta

SEQ ID NO: 299250 - DNA, 321 bp, Glycine max
  unsure (1)..(321): unsure at all n locations
agcttttatntaaactccncaaggaagncnctcgagagagcttatcaaagaagcttctcaacgtaactacctatgctataaatagaagcatgtgtcacacttgtggtaactctgatgaatgagagtcttgtgagacacacttcaaagatcaacttctctccttcttttcctccttcaatttcctgctcccccctctctctctctctctttcttttcctccatagaagcatcctctccaagcttcttatccaagcaccttcttggtggcaaatctccttcttccatggcgtattccttagtcatatgccatgacaattaaca

SEQ ID NO: 299251 - DNA, 227 bp, Glycine max
  unsure (1)..(227): unsure at all n locations
cacactgtattaacatgaagctgacgatttcaccaatccggatgaaagtatttgtgagtttggacttgagtgtttgtgagccaccttgatgtcaccctaacatcaagtgttggacctgagtgtgtagaagtgatctctattgntcagagagcaatctctggtgtgtatttgatttaattgtatacaccggagagtgattgagagggagtgagaggggttctcatatc

SEQ ID NO: 299252 - DNA, 300 bp, Glycine max
  unsure (1)..(300): unsure at all n locations
ttcnttttggnttaagctcacattggcatcacccgcataatatacggacttcaggtaaggcagtctgcaaccacgttgcataactgacgacctaaataagttgtcatgtcaaacaanatttaaaactaaaatataaataanatttaactaatttcgtcctattcaataatatcatatgtaaaaaaccttattcaccaaacaaaatatctaaaatatccttaatttaataaaagtttattttaactacgttttttcctgtgcgagtaatgaaatgatacttaaaaaatattaatttttaat

SEQ ID NO: 299253 - DNA, 477 bp, Glycine max
  unsure (1)..(477): unsure at all n locations
nccttaggggaaattgccgangtatnnctgngaanaatanannacncaacgctaagggcacaggtacatcgtaaggaanccgtttgattccttaccaacagnngcgacacggaggggcggcataacatcataaacacacatatctcagataccttaatggtgcaatcacaatttacacacgcatgacgatgcagggactaggtactatcatgcccacgacggcgtatcgagggcgcccacttcttgactacagaggaacacatcttcgggttagaatcgtggacgaacaatgcaagaactacaacgtggctcaaggacaagaaataaaaagacttcccctcgttgggatgggagaccaaatgcactttcttcataatagaagctcactgcatattgaatacgtgcggaacaatcttatcancggagactgtaacctaataaggtcaagagtctacaaatcatagatgtaacctggtc

SEQ ID NO: 299254 - DNA, 254 bp, Glycine max
  unsure (1)..(254): unsure at all n locations
agcttgttcttggtttanacatgattgatacatgatttgggacttgtangattcaatttgngcaaaattggatgagggaaagtgtgatatcgaaaatctgcacttatgcaaaattttgctgtcaactaagtgcagcagaatttggctctgtgcaaaaaatgatatgaaattgctggttgtggaaagagtagcaccgattgggttctggacgttttctatcagatcccaacggtcaaaatgtagatttatgtact

SEQ ID NO: 299255 - DNA, 298 bp, Glycine max
tccaaataaaatatttgggaacgtctattagactataactctttaacagctactgtgtatttaacgggttcattaataagtcagattaaaaaataatttgtcaaattataattttggatgacgcttacgtgacaaagtggacgtttgatattgaaaaaattaaaattacttatttaaaacaatataagaactaaacgtcttcatttagagataaaagactcaaaatctcagatttaaaataatggtgaaccaaaattattaataaaaatatataatcgttttaaatattttattttcg

SEQ ID NO: 299256 - DNA, 318 bp, Glycine max
  unsure (1)..(318): unsure at all n locations
atctttgcccaataacactcctaacatcaatagtaatattaatattctaactcccctcccctaaaccaaagttcacttagcatcacgcttgttacaaagtattagaatgtcgcaatatctttaatgtatctcagattattgttaggatcatattgcaaggtgtgagaagtgagtatcacaatgaaagtttggcattctaatgtaaggtttattaagccttaaccttgagttctcaactacaatggctngcttttgtggtgtagttcttcccagagtcttaataattggtattagagcttcttaccatgtctctatgct

SEQ ID NO: 299257 - DNA, 368 bp, Glycine max
  unsure (1)..(368): unsure at all n locations
tagctatnatagggtgtgtatagctaagctctatcttctctttctaaggaggtgagcttagctatgagagaggtatgtgtagctaagctctagcttctttaggaatcttcttaaggaagtttctcacggaggtgagcttagttatgagaggggtgtgtgtagctaagctctagcttctcaaggaagttttctcaaagaagcttctcaaggaagttttctcaagaaagcttctcaaggaagctacctagtctatanatagaagcatgtgtaacacttgttgtaactctgatgaatgagagtcttgtgagacacaacacaaagttcaacttctctcctctttcttcttcaatttgtgctccccctctctc

SEQ ID NO: 299258 - DNA, 277 bp, Glycine max
  unsure (1)..(277): unsure at all n locations
ttttgggggtggccatttcttggatggccttgattttctcaaggtccacttggaccccatttctaccaactacaaaacctaagaagactatattatctacacaaaaggtacacttctctatatttgcatagagggtgtttttcctaaggactgaaagaacttgcctgagatgtcctaagtgatcatctaggctcctactgtacactanaatatcatcaaaataaacaactacaaatctacctatgaaatccattaagacatgatgcataagcctcat

SEQ ID NO: 299259 - DNA, 293 bp, Glycine max
  unsure (1)..(293): unsure at all n locations
ctagagctntagctccacatacctctataatagctaagctcacctcccttgagatgagaagctagagcttagctacacaccccctatgatagctaagctcacccccatgacaaaaaacatgaaaataacacaaaaaagtccttattacaaagacaactcaacatggcccgaaatacaaggctaaaaccctatactactagaatggccaanatacaaggcctagacgaaggaataacctattctaatacttacaaagataagcgggctcatacttagcccatgggctcgaaatc

SEQ ID NO: 299260 - DNA, 367 bp, Glycine max
  unsure (1)..(367): unsure at all n locations
ccaacctggtaggcctagaacctcctccaccaaggaaggcctaacctactggaaaacatggccactggaccggagaaggaaaaagaataatggaaaacgtcccttcaaggaaaagatgagtcaagaggaagctcaccaccatangaagacatgcgataagatcttggatgtatgagaaagataattggcaagagaaggagagaaagggtacgatatcttgtgcctcaaatgaggtctgaactttgaaagcgaattcttaaatgatcaaaggtgacaaaatgcacacctatggcttctattataccctaagggcacaaatttggaggaaattgaatctctataacaattcacttgaattgacatgaac

SEQ ID NO: 299261 - DNA, 474 bp, Glycine max
  unsure (1)..(474): unsure at all n locations
naacttaagatcagatcaacctnnaaaaagccccagctgaaacanngtcaggtgcgggcccaaccttaattatgggttccaacaagnnncccaaatccaggagtaccatgaagggatagagaagacatactgttgataaacacccacaaaatatagttatggcaaagcattatttttccaaccttttaaaaaatataaaattattaataatatttccactaattaccataataatatattaatggtagaaatacttaattcttttaagtggataacatanagcctcttaanaaattgtgagcaagccaacttgttatctagtccgttctcatacacattcctaggagnatgtatcatattcattttcaaatcanaataagaaataacatatcatataagttcctaggtgtcaggtcaatcctattgatatcaataaaaataatttaatactgctattgggtgtctagcactcag

SEQ ID NO: 299262 - DNA, 449 bp, Glycine max
  unsure (1)..(449): unsure at all n locations
agggagcgctttgcattgananncnnccnnnnttngnaaanccgccnggangganacanagaaaggcacaagcaggcaacaatttttttcgaaaaaccaccccaccaagagggggcatcggaaaccaacgcacacaccccaccaaagaaacccacccccacaaaggnggaccgggagggagngaagaacaccaacccgcggnncggggagcagaangaccaccacagagcacgagaagngagacnctacngcggcccccacacccgcgagaagaccccgggaacaacgcgggaaacaagcaagngcccggaaccaaccgccccaaagcggagaccataaccccgccggccgaaccggagacggcaaacacacagccaacggaaaggagggaccaaanacacccgcaccaagggaaggacgcgcaccggacaccgaccccaaaaaagacg

SEQ ID NO: 299263 - DNA, 491 bp, Glycine max
  unsure (1)..(491): unsure at all n locations
gttcgtagncatgagattcaaanctnnaaaaaagcnngaaanaaancaaanncnagaggcggagaactcttttaacttttggagccgaaaccggggaggtgcaaatcaaaattgcaaattgtctctaaatcaatttagccactagtaaatcgattacatcctctggtaaatcgattacaagcggattctctcatagttaacgcttccagaatttcttcaactaaaaccaaagtatagggatctgagggctacaatantggatttggtcatccgtgtacacctaactgaagtggttgaagaatatagcccctctaaggtaacccccactatgttgcattggacttatgctcttcttgtgcgtgtttatagaagaaaaacttatttatattgtatccttgccaagtgataacatttctttaaacccatcctgctactttcttaatgttcagaagcttatcctcagcagagattgatctttaaccatctgaacg

SEQ ID NO: 299264 - DNA, 138 bp, Glycine max
agctcctttcctttttccactcaggtgtccaagtgtgggatggcatagggtggaatggtggacagcctcagtaactgctaccatatcctcatctggcatcatgtaaagagatcctcgcttctttccacgagccacaat

SEQ ID NO: 299265 - DNA, 240 bp, Glycine max
  unsure (1)..(240): unsure at all n locations
aagattaacttcattcattatatgatgaattttacgggacgtttaatatccatcctcattggagcacaagttgcacataaacaatggctgagaacatgagacatanatgttannggttttagaaggaaatcctgtcatcanttccaagttattgatattttaagttctttattttanaattactctattttataaattttaagctaattagaattgtatatatatgtggacaatacattc

SEQ ID NO: 299266 - DNA, 188 bp, Glycine max
tgtgaaactctgtctgtcacatcattacttaatggacaaatactaatggcaggtaccaaagccaaaaaatgagaaacgcccaatagagcaataaaataaaaaattaatatgtagcaatctgaataaggggtatatcttaggtaagaaaaagatatttaaaccaattattttatgaatatcatcttaca

SEQ ID NO: 299267 - DNA, 376 bp, Glycine max
  unsure (1)..(376): unsure at all n locations
gccttaaaaagggtggntttgcaccttctcgctattcctatattctggcttagcgagcgtccgctaagcgcaccactcatgggctaagcgcgaggaaaacactagaaaaagatgagttggacaggttctttagcgcaccgcttatctactagtgcccacttcgtcatctgtaacgagaaagctgcgtaaagctgaatcgatttagaagaagttgactaagatcagagctttgctgttagattttaaagagacaagtcaagttcaagagtttgaagattttgtgctgaaattgcggaccaactgaacagagccgttgngctgaatgattggaggatggaatcctaaggaggtcatctacactgattntgatctcatt

SEQ ID NO: 299268 - DNA, 110 bp, Glycine max
tgtctgccgggcagacaaccacaaatcatgtttacaaatcattatgaattatggcattcctcgaaagtagccgtatgatgcgtaccaccaagcgtcataggcactatacc

SEQ ID NO: 299269 - DNA, 186 bp, Glycine max
  unsure (1)..(186): unsure at all n locations
agcnttaaccaagangggatggtccatttcaagtacttgaaaagataaatgacaatgcgaacaagattggattgcctagtgagtataatgtgagtactacatctaatgtgtttgacttaactctttttgatgtagatggagaagccgatttgagaacaaatccttttgaagagggagagagtgata

SEQ ID NO: 299270 - DNA, 437 bp, Glycine max
  unsure (1)..(437): unsure at all n locations
nggcgattcagttgcaagttctacgnccactatnaatactcagcctccatcattgagttaagtccaccaggaggaatctgttaacttggcttgatcaagattaggctaaactatcatgaggcaatcggggttaatatcttaggaaacacattaggaccccttgaccttggttgaatgaaaatattttttaacttcaggcccctataaggaagccacgtgtttctcacatcattctctccgtgattttcttttgcacagatagttacacacttgtcatatcatgctatcttacacaccgaccctattgctgaatagcttaccaatacacaagtcctcagagttcatactcgtcttaccgttatctactttgcgaccgggcacttgcgagcaacatagccatcagctggttaataagaaaatgattttacaaattttgt

SEQ ID NO: 299271 - DNA, 193 bp, Glycine max
  unsure (1)..(193): unsure at all n locations
agggcgcgcaagctttcattttcaatcnggagncgcncgangggggcatgactcaatcggacatcctttgataatgttattgtcgtttgaatttgctacgagctatcgtggtaatttagagcatctagatatatttcgggacacaaacagacatcctgggataaagacattgtcgtttcaatttggtcagagc

SEQ ID NO: 299272 - DNA, 539 bp, Glycine max
  unsure (1)..(539): unsure at all n locations
attgttgtttttttctttgatctacngngacacnanananacncaagcgnctagnctcaatngggagagtctcgaggatgaccgtttataantctgcatccgagnaaaaaganaggggggcgngaatagacnaacagaccccatcctcaacngggagcgncncgaaaaaaaacgggacgcaaccggacgacccgggaanaaaggggaccggccccgcaanaggcgcacgagacacgcaggcggacacaaacaggaacagcncgcggacagggaagaccggaacacggaacagaccacccgagacacaacggcaaaggcggaaggaaaaaggagacgaaggcacccagccggcaaagagcggagcagacccggacangaaaacaggaccgcagaccggacacgcagcgcgaaaaaggacagggccaagcaaaganngcgcaggagcaggagcagcgcgaacccacgccgacgagggccnagacaaganggcaaggacgcaagacccaccggccgaggacaacagcgaacgccaccgcgcg

SEQ ID NO: 299273 - DNA, 302 bp, Glycine max
  unsure (1)..(302): unsure at all n locations
agctttgttcaaaaatcaaaagannnaactctgcgagaaggttttcaagttttgtaaaagttataactctttccaatggtttccattgactagacatgaagagtctataaaagcaagaccttgacttgcatttccataactttttgacttaactttttaacaattctttataacaacttttgagaaacctttgctaacttattattcttcttcttctttctttgcaaaaagctttcttaaagtatttgggtttccaaaccttgaaaacaaaaatgtggtattcatctttttctttctcttct

SEQ ID NO: 299274 - DNA, 345 bp, Glycine max
cagcatcatctatggcgtcagttatcttgtcaacattggtgaggttgggatcaaagtgcacttttgtctactccaaagcaagaacaacaattgcttttttcacgcctactaccaatttgaagggcattcccaacagagtcagaacagcttgtgcatgccattcctttaatcctcactcggcacactggtatgtcctgcttatgaagctcatttactcgaaacccactctgctctatgctgtcttttatgtgttgcacctacaaaaagaatatcaccaatactttggtcagtgtaaatattgaagtacaccaaagacttatatctattagttaatatacataattg

SEQ ID NO: 299275 - DNA, 290 bp, Glycine max
gaagcacccgacgacgcatacgacccggggacaagacacagaggactttttcccacaggccgccgggggggcaaacaacgccacccggagccacccaacgacggagccagaggaccgacgagacaggcgagaccaccacagacggaccccccgaaggacaaaaagggggacagaaccaccgaagggcgcaaacgaaccaaagaaaacagaggcaaagccaaagccccgaagaaggaacaagaaaacagcaacggaaaggagagaccccacacggccagaaaagcgccccc

SEQ ID NO: 299276 - DNA, 303 bp, Glycine max
  unsure (1)..(303): unsure at all n locations
ggtaggncctgnangatcaaatgnaaacggggaaagaggaagaaattctctttccccggaaaagcgggggtattaaactctcactcccgatcctaacgtaggaataacatggcgcccgttcctcacagttgattatctaggagaaaaaatttgctttcttaaactagctaaatatttcagattccgaagaacatgcacatatctactacatggttaactaattttattgttatccgttaatccacaaatggaactctgcgtcgaagctttttggtgctatcagctcaataggacataatctca

SEQ ID NO: 299277 - DNA, 421 bp, Glycine max
  unsure (1)..(421): unsure at all n locations
agggacgtctctttgtanancaccggcaatncagctcggccccgggatcctctagagcgacctgcggcatgcaagtcgtccatcatacccgacccncgcaggggcgaggatgatganacacatcttccgattcaattgttacatcagataacaatctatttatatttaaaatcttgggtgtatatagtccagaactttgctaacttccgatagcccggagtattagcatagattgagattaagaattcggagggatacgctactgatcgttttgatgattgcactgaatatgtcgggctacttggcctgacgcatatagggagccaaaaaagccgcgatactctgcggcataagaacccttctctttattggcctccattccaccgaacacatggggagatttccttccatgtaaatactg

SEQ ID NO: 299278 - DNA, 484 bp, Glycine max
  unsure (1)..(484): unsure at all n locations
gcatcnagngaaagtcccganagatnntctnnnnntnaganacnnaacnncagagngaaacaagatggaagtggaaggacattaccttatttgtccaaccacggacaaaaccgagagggggcgcaactnggaancaacctatcaaacagcnccngannccaccaaacggtgttggatatacatactttatctcaccctcgactccatttaggatggctgaattattcagcgaacttgaatattattcttcaacttcaccctctgcatacatagcccccacccttattcatgatgatgctcacgactaaaaccaagactactatgtgccgttatatgttaatagagaacacaacgaccaggacagttccttcgtcgaatatctctgttatatacgaataatgcgaccctgagcacaaccccgaacttatattaggctcttctgctgggtacataaagagcaaaaatgaataaacatattcttatt

SEQ ID NO: 299279 - DNA, 447 bp, Glycine max
  unsure (1)..(447): unsure at all n locations
aggagctattcgtttgacaccanccnnnntggaaacacgcgccgagatccttagaggcaccagcaagcngcagctttttttcatggcctccnanggcggagagcggggtctatactcatcttcagctcgaagcggcgtctcctctgtctctttcttctccattctgcagccgttcatctcccagaagcaaaggaatccattgatgaaaaagatcctaggcctacaagctccaatggagcttacatcatgtggcatcaagatcatttttgactacgtgatgttcatttgcctcctccatccttttgttccgtgcattctctataacaacgtgagcttcatcttattctccatgtatatcctccattgtcctgtgggcaaggagaaggttacaaaagactccacaaagataaatcgattatatctaaatctacacttgtctagcattac

SEQ ID NO: 299280 - DNA, 518 bp, Glycine max
  unsure (1)..(518): unsure at all n locations
naatcttacgtcangngtangtacnantncnananttnagannacnntccngcgcccagagaaggagngcacggaggaaangcttancttcnctanaatacngganagcaannnncgaacgacgggcgctgttggccaacacannaaagcaccacacgaagggcagcnccacccaagaaggccnaacctcgccttganacgaaggacccaganngcccctnncacctacgaaanancaactttttggtggaagtgtgtgagggaacaacctccccactgagtgtgatccacgaggcgtcccaaccagacatactgtaggggggggttaatatccatttatttggaagggtaacttgacagggtgtgagggtctatctgtaccgggagatcgatcttcccccttacctttttgnggggaccgtgcaaggcacgacccaccattgacttcggcttatgtgggaacattgaatggaaattctccaagtgctcttagcttacgttacccagaaccatatcan

SEQ ID NO: 299281 - DNA, 332 bp, Glycine max
  unsure (1)..(332): unsure at all n locations
catgattggtacatgatntaggacttgtatgattcaatntgngcaaaattggatgaaggaaagagtggttntcgaaatctgcactttatgcagaattttgctgttggaatgtgcagcagaattttgtataagtgcagaaaaatgcttgtgtatggatggttgtgaaaagggtagtacatatggggttctggacattttctaacagatcccaacggtcaaaatgtagacttatgtactagagacttccagtaaaatttttgagtcgatccaacggttaacgaactggaacaaagagaatgttactggggtaattgaatgtganaagctgtgat

SEQ ID NO: 299282 - DNA, 117 bp, Glycine max
atttccccagataaatcaatctcttgatgtttactgtaatatgctttcgtgctataaacatgcacaaaatctgcaggctcaacaacacaaaccaatctagctagcgctaggccctat

SEQ ID NO: 299283 - DNA, 353 bp, Glycine max
agcttgtctatttataattatattgagaacaactgaggagtgttgtgttttgtacaattcatacataaagtatgtgttaatagacttcttggattgtgcctgaatgaagaggaaaatgccctgaccgactcttcagagtctacgtcttggggataaatacacccggtttgagtacttctttatgcttgaaccaatcccacatgattggagcattctactcaaacaacgtgaccctaactagtctccctatgattttacctagtgagtgacctaccctaccactgtgtggattgttatggcatgcactccttggcacccgacgatgtctttactaacatggtaccacattgcat

SEQ ID NO: 299284 - DNA, 112 bp, Glycine max
tacaaatggtctgccactaccgcattccggccgaaagtagggacatttcccagactgagccgtgtttatgcgataaccctttacagcgcagacctcccaaacgcttgttgcc

SEQ ID NO: 299285 - DNA, 355 bp, Glycine max
  unsure (1)..(355): unsure at all n locations
tattggtgggtttttttcctttacctgtgtctcaaagcttataaaagagccttctagatctgttcttcaattgattntgttcatcaaatctttttttttctttttttgctttttatcatagtccaactccttcacaaatatcacccactttagcaccgacatctcattgaattcccactgctgacctctccaacctcttgtgtcccttaatggcatccgtattcactcctccctcgaagtctcttgctctttctccttttccatcattggttggatctttcatgaagctagtgcgatggattgnggaggggaggagagtgtgatatagatgaccattgtcatatctaatttggag

SEQ ID NO: 299286 - DNA, 218 bp, Glycine max
  unsure (1)..(218): unsure at all n locations
ttattgatatcttntatagcgagcacggattcttggatagacattaatggggatcaaagtttgaatacatggagaaatatgcattcttgcggtgaaactactccacacctatgtcacaaaactttatcttatgagatcgctctcctataactacgatgaaggaatcaatgattattctcatttgacttttatcgtaaggcttaacttttatatatata

SEQ ID NO: 299287 - DNA, 130 bp, Glycine max
tgtcatccaaaccaccttatcccttgaggttcctcaaaatgtttatgtatatagtgtgtggaaggtcaaatggaaggttctccatcaagtgaaacaacacaaacttatggaggtcagaaaatgttgatgt

SEQ ID NO: 299288 - DNA, 187 bp, Glycine max
taccacttgcacggtgctggaactacttcacatggacttgatggggcctatgcaagttgaaagcctaggaggaaagacgtatgcctatgttgttgcggatgaattctccagatttacctgtgtcaactatatcagagataaatcatactcctttgaagtttcctggagctgatctacaacttcatag

SEQ ID NO: 299289 - DNA, 183 bp, Glycine max
tgtggggaaattctggaaggccaaaggcctgccgcttttgaccccatttttccagtcaccccttttgctttttgggattttttcgaacgggtgaactcatgatttctaacacactgtttcttccgaatgaaccacacttatgactggaatcaccccttttgctccggatgccaaacttttggt

SEQ ID NO: 299290 - DNA, 383 bp, Glycine max
  unsure (1)..(383): unsure at all n locations
agctttaactttatttttcataagcactttgtgcttgtacattccaccgcaacgcacccttcttcaaacattcggtcataggacttgctatagagctaaaattctggataaagcgtcgataaaatgatgcaagaccaatgaaagatctcacctccgaaactgttgtacggctcggccaagtcttgatagcatccacttttgcntgatcaacggatactccatctttagacaccacatatncaagaaacaccaccctttcaaccaagatatcacacttttcccttctcccatagagttgttgtgctcttacggtctcaaatatttgtttcaaatgagtgaaatgctcctctatagattngctatacaccactatgtcgtcaaga

SEQ ID NO: 299291 - DNA, 252 bp, Glycine max
ttagatatatgtttatgataatacatgtttactctttttttcttagcatataacgatactcaataagtgacgttgaagatgttatagtatagctctgatatgatattgcaaattattcgagtcgatgtatatatatatgggttgtgtcttgtaaacattgctatgacatgataatatgatatatgacaatcagtgaagtaaacagtgatatgtgagctatgaactgtgtagtcacattccttggaaaatctt

SEQ ID NO: 299292 - DNA, 208 bp, Glycine max
ttatcaagtaacacaagttgagttttattcacaacattacagtatatctctcttatcttactgagagtgattctcctatattcttgagtgattcaagaacaccttggctgtatcaaaggactttcacaactctttgtgtgtagtcctcgctggaaagagtgattcattgcttcctttcatcatcaccacttgtctttcaaaccacaat

SEQ ID NO: 299293 - DNA, 303 bp, Glycine max
ttgctagagacagtgtcaatgctatgtatatggtttctttctttgtggcaccaaaggcttactcatatcagtgagaatgggctgaattgtttagccaagaaggatatgcttctacgattgaagaatgcaaatttagagaaatagtctcattgcatggttggtaagaaaaccaaagtatccttcaagaagaatcctccctccagaaaatctgagttgcttgaatcggtgcattcagatgtatgtgaccctttgaaggtgaaatcctttagtggtgcactttattcttgtaccttcattgatgac

SEQ ID NO: 299294 - DNA, 365 bp, Glycine max
gacccgggatcttatgtcgccgcagctgttacttacattgaccctgcacgtgctggaactctttaatggcttgatggcctatgcaattgaagccttgaggaaagagttgccttgttgtgcggatgattctccaataacctggtcaacttatctagaaaatcagacccttgaagtttcaggactggtctaaacttcaagaaaaaaactgtgtcatcagagatcatgagtgccatggctagagttgaaaacacaattactgaatttgccattgaagcatactcatgagttctgcgtatacacacacaaatggctattgaaggaaacagacttgcagagctgtaggcatgcttatgcaagacttcctt

SEQ ID NO: 299295 - DNA, 323 bp, Glycine max
  unsure (1)..(323): unsure at all n locations
nntgtgtgggagattcagataatcatctaaagattcatagagtggcttggaaggagctatgtaagcccaagggcaagggaggcttgngctttaaagaatccataaatntcaatttagccttcttgatgaagagcgggtggagcttatgttcgaatangatgcgttgtgggtcagaataatcagagaaaagtatcactgtggagaatctttgatcccagatattgattgtaataggtttgagactaatttctggtggggcctttgtaaaacctggcctgaggtacagaaaaacctttgctgaaatatttgggatgggaacaatg

SEQ ID NO: 299296 - DNA, 303 bp, Glycine max
  unsure (1)..(303): unsure at all n locations
gatgctcanaaacatcaatatctatcactccatcagtaggtctgcccagatatttgttaatcacagcatgggagaatttaacacactntcctctgacaaacaccttntgatactcatcactttttctgttagatatgtcagagggaatgttgacaatgaattccctgactaagccttcatagcaatctcccaacttgctgacagtcttcagcagtccagcagccttgatgaggtccatgatctccttgcaatccaatgcagctctttccagttctctttccaaggccagtcttcgttgataca

SEQ ID NO: 299297 - DNA, 276 bp, Glycine max
tgtctcagtggttatgcgagaccgagaccaacatgttagctcttatcagcaagtaccaagaagaattaaatctagccacggcccacgagcacaaagtggcggacgaatatgcccgagtttggttttttaggaaaaacgccataactaagcgcaccccaaggcatccttatcgcaccagatccaaatctaggacgatgggtgaccaagaggaagtacaggaacagatgaaagccgacatgtcggcttatatagagcaaatgtcttccatgatggatg

SEQ ID NO: 299298 - DNA, 309 bp, Glycine max
  unsure (1)..(309): unsure at all n locations
aaaaanncgacccggtccttaagtgacgcggctgcactttattctctctgaagactgatactgcttttaagcatatatatactccaatggtccatcgcctactgctaaatgtcaaaaagaggcaacctttaaattacccacggggaagatttggggccaatagctcctcctggtgaagaaatgatcccatgatgaacacttgcaggtctcttgaaacatagtattgcgccactccgccttgttgcggaaaataggaggtgaaaagaatcatacttctccaggcatgccaaatcggcacaggcaaagaga

SEQ ID NO: 299299 - DNA, 268 bp, Glycine max
ttacgtgtatgattctcttcatagagtttggccctcgaaattgttatgaggaggcctgtatatattaattgatgcttagttaattaagactatatcgaatagttgttaccgtgataatatcattgcataattttgatttctattcttccaatacaaaatggaaggttgagcatggattattttaaaacattgtcaagtaggattgcagcaatctcaattatattattgtcatatgaaaagacattgagacatgggaaaaattttatgc

SEQ ID NO: 299300 - DNA, 335 bp, Glycine max
  unsure (1)..(335): unsure at all n locations
aacctgtactgtgagagcaagcgcgagagctcgacgacaaccatgactacacggtgtaaacttgaagggagggggcagtgccatgtggcgaccggtatgcgaaaagtgaagtggaggtctcaagatgaaagaaagtggaaactaagtggggcggaagttaactanacgcaatacaatatttaaactacacatataatagtaactttttaatgaaaaaatattatntagggtatttgcttaatctactttatcgtgaaagaaagtatgcaacatattatcaaagttttaatctagtgccgtaaaatacttaggcttttctaaacactataaaaaac

SEQ ID NO: 299301 - DNA, 399 bp, Glycine max
atgggtacccatcagatgtggtactaggtggttgtttgtcgatggtgcaaaacaattctccacatgcacaaatcacgtataaacccaccatcccctgttgcccacctcaactgagctcatgtactcccacgtagcccttatcctcgttcctctcaacgccgggtccccatcaatcctcccaagcttccacaacatccaagtaattcaacatccaagcctcatgaactaacacagccaagaaaatagggcagaggcagaaaactctgcccaaaacacaaaccgacatcacagcttttcacactcaaatactccagtaatattctcttcgttccaattcgttaaccgttggatcgactctaaaattttactggaagtctctagcacataaaactacattat

SEQ ID NO: 299302 - DNA, 296 bp, Glycine max
  unsure (1)..(296): unsure at all n locations
tggtgcacaacacgttttccacatccacaaatcgcgcataaacccaccatccccttgttcccacctgcaactgagctcacgtactcccacgtagcccatatcctcgtttctctcaacaccgggtccccatcaatcctcccaatctttccccaacatccaagtgactcaacattcaaacaacacataccatcacagccaagaaaacangggaaaggcagataattctgcccaaacaccaaccaaaatcacagcttatctcacttaaaggcctcagtaacaanntccttcgtccaatt

SEQ ID NO: 299303 - DNA, 338 bp, Glycine max
  unsure (1)..(338): unsure at all n locations
cctccacggggtataatgatatcagcgtacttcttggtgggaagaataaagtcatcanaagctggcttcacaaatntagaatactgcatcaagtatatattataagagacagttactaatatacgggtaacaaaaaaagggaattactaatattggtagacataaaaaaaacgaaatatgttagcttgatttataatcataacctcaaaacagatcattgaagatntaatntcatanagactgacttctttacatgtttctaatcaatgaaagttcataacagcctctcagcaacatgaactataacaacatttccaagtcttgaaatgcagtacatg

SEQ ID NO: 299304 - DNA, 186 bp, Glycine max
  unsure (1)..(186): unsure at all n locations
gcattcaccccttccncattntcttgacaaaccataaataattnttttatagtcgtaaccttattgtattgcaacttaacagcacacaacaatcacttgataaataagtggcttcagctcctatntcttagtttttntaattaccataacccacagttgacaataatgctaaagcacaataccata

SEQ ID NO: 299305 - DNA, 221 bp, Glycine max
aaactcaaggcaacgctatatgcacgctttttcacctacaaaaagtgcggtttatccaaagcttggctatttacagagatgactgcttgcaacaccgatagaacatcttgggcttgagcagcctatcccagagctatcccgtctcatcttctgcgtgccatcttcaacctttttccgtgaattcacccattgtggggtggaggggatcttctgaccctctt

SEQ ID NO: 299306 - DNA, 522 bp, Glycine max
  unsure (1)..(522): unsure at all n locations
caaaaacgggtggtaagacgtcngcacagcacatcngggaattnagctcggacccgggatcctctgagtcgacctgcggcatgcaagctttattgtctgataacgacaaagagtacacttcatcataattcaccatgttttgtgaggaagcangcattgagcatcaattaacaactccttacacccctcaacaaaatggggttagtgaaagaaaaaattgaaagataatggaaatggtcagatgtatgcttcatgagaaagggttacctaacgaatattangcagaagctgcgaacactgcagtattcttgctaaatcgacttcccaccaaagcagtaaatatgaagactccttttaagacttggtatggttataaaccttccttgaanaatttaaagtatttggatgcttgtgttttacttatgtgccacagattaagagagacaagctagacaagaaagctgaacatggtatctttgtgggatatagttcagtatctaaagcttatagaagtttccaacn

SEQ ID NO: 299307 - DNA, 311 bp, Glycine max
  unsure (1)..(311): unsure at all n locations
ccttcctggcttgttgtgttcataataggattccttctcttgatggttgcttttgttaaggacatagactttcagagtttctttgcctaaggatgtgtgatgcttcacatttccattgcagtgtggagattcttctttgagaggaagcttgnggatcttgcacatgaatggcctangcatgttgttggggacatagcattggcaatatcatgggtcttttttcttgtgtacacatggagagagaaatatgattagttaatntactttataattgtgtaagttttttgtgcttgtggttgtagaaacaacat

SEQ ID NO: 299308 - DNA, 389 bp, Glycine max
  unsure (1)..(389): unsure at all n locations
tagctttgatgtgtgcgtacccaccatcttttcatagtagagtatcgataatgtgtctaccatcacgattatcgtctccctttccatcattgggggtaccacttgggccgccagatccgtccaccttttgggcgtgttctttgaaagatccgtccccctttgtgcacatgttctgtagttgcatcatatccggaaccatatcacaattgtactgatactggctaacaaaggcaaccattaagtccttccaagactggactcgggaaggatccaagttagcgtaccangtaacagctaccccagtaagactttcttggaaggaatgtatcagacattcctcatcttttgcgtattcccgcatcttctgacaatacatctttagatgggtc

SEQ ID NO: 299309 - DNA, 415 bp, Glycine max
  unsure (1)..(415): unsure at all n locations
agcacggctgggnnacatgatatatgtcangggtttgggtttattttaaagggaataaaanggggaattgtatcatgagaaatgtctgcggggggtnntgaacccatnngcgggcgccgaagttgacagcgtgggcattctccctccttacnntctttgcaccagttgcttccaattctttttagcattttggcacttgtggagggaaaacgtaatcgaacttccctcttttcaaccatacttcaattctttcctcggcgaatacttggtccgcgaagctggacggcatgtaacctaccaacttctcatagtaaaacactggcaaggtgtctaccatcatcgtgatcatctccctttcgaccatgggaggggccacttgtgctaccaggtcactccatcgctgtgcgtattcttt

SEQ ID NO: 299310 - DNA, 416 bp, Glycine max
  unsure (1)..(416): unsure at all n locations
gatattaaaaattgactataatcagttgagtggcagtacancgaaattatacaccaattattacaagccaaagtctctgaacattttttgttgcttctttttcatcatttcatgatattggatcaaaatggtcccccacttcaatattttcaattcgagattgactcttctcatttatagcaaaagatccaacatgacacttttgctttcacgtacgaaaagcgaaatgctgatggcctctatcataaatacacactactctatacaaacaatgtgtaaaacttcaccttagattttcatgtaactatgccaaaatattgcaccgcgcaaaaacttataacgtttccatttcataacatatgtcaggactaccgagaccatcatacaacttctattttccacaaatgcaatattga

SEQ ID NO: 299311 - DNA, 332 bp, Glycine max
  unsure (1)..(332): unsure at all n locations
ntattcaagacaaagcaattaaagatattcaagatggatgatctagacaatctctagagtcttagaaagggtatattaaataggaagggaattccaattgaagtagcaaatttggcctgcataacatattattatgtaacatttagtgcatgtcaacattntcaagtgttaataacagaaaattaaatacaactccctgttaagtcgacttaccaaaatgtcatcccatactangtcctttagagattctgacacatcttttcaatttctatgtagcataggaatcttttctcgaactacgacccccaaatagttgtggaacttttattttt

SEQ ID NO: 299312 - DNA, 392 bp, Glycine max
  unsure (1)..(392): unsure at all n locations
tatcttgtatgtcttggatcttcttcatcaatgaattcctttgcttcttgaggtttgattgcagcgaagtggagaaggagaaagatgaatggagatgccacttcaagtagaagatgagtctagaagaagttcaccaccataggaagccatggataagagcttgaaggtagaagaagatgaatgaagggagaggaagagaagagcatgaaatttagtgcctcttaagaagactgaactttgaagtttaattctcatatgatcaaagttgaaaaaatgcacacacaagacctctatttatagcctaagtgtcacacaaaattggagggaaatttgaatttctattcanatttcactcgaatntgtggagccaanatatcactaattatgattag

SEQ ID NO: 299313 - DNA, 417 bp, Glycine max
  unsure (1)..(417): unsure at all n locations
tcatgatgaatcaagagtgattcanagatgttttgatgatatctaagatgataacaaaagatgatgacaaaggtgatgacaaaaagctcaaaggtcaattaaagaatgagttcaagatattcaagatagaatcaagaacacttcaagattcaagaggaaagttgatttcaagaatcaagagatcaagatttcaagaatcaagatttaagtgatcaagattcaagactcaagattcaagaatcaagagaagacttactcaagataagtatgaaaaggtttttctcaaaaattgagtagcacatgcatttttctcaaaacatgtttaccaaagagttttactctctggtaatcgattactagattgttgtatccgataccagtagcaaaatggttttgaaaaaaaaatcaaatgaatta

SEQ ID NO: 299314 - DNA, 418 bp, Glycine max
  unsure (1)..(418): unsure at all n locations
agcttgtcatattatctcttcaccaacctttgttcccacgatggattcatatcatcttcatatgactggatgaatcttgtaatatttggattaacaacattaaaattctgacacagaaatacacaaattgagaaatgagatgattatgcaggaaggcaaaacttttttcccaataataataaagaaattcatattcacaatagaagcttaaaaaatatcttaagtagggtaaaaaatntactcatgttcacaatactttcaatagagttaaacatctagcatatgatagaagctcatttgctattgctaggaaaaggcttatctcattatggcgaggcaacaagctccaggaatataagaaaaggaaataaactctcaccagttttagcttacatanngggaacataaaagcttacat

SEQ ID NO: 299315 - DNA, 307 bp, Glycine max
  unsure (1)..(307): unsure at all n locations
gcttgtacaagcacataaagganaagggaaactgatgaatgtgtttacacatcctttgcacaaaagattaataggcctaactatctaaaaacagtccccagtggagttgccaattgtcacaacctaccctttggcgggtgatgtaagctccattggagcttgtaggcctaggatcttcttcattaatggattccttcgcttcttggaagatgaatggcagcgaaatggagaaggaatagagagaggagatgccacttcactgaaaagatgagtctacaagaacctcaccaccatangaggcaatgga

SEQ ID NO: 299316 - DNA, 384 bp, Glycine max
  unsure (1)..(384): unsure at all n locations
tttagatcagaacttctaaatttagggtctttggaatccggacgcgaacacaaatatatgcaagtaaccatagatatttaagaataatatttgttaaaatacattntcttaatcgataataaataaataaataatatttttaacatatatttatatttaaaatgaataatttgaaaatatatatattcatactaaaaattaattaaaccaacttatttatatataattagagacatttgtttatgcaggtatccgttaaactgttcaaatccaatataaacaggatntatccattntactcaaccaacatgcatcctagttctggtcatgcagcggtttgcctgagtccagtctaaaacaaaagtcatgtgattnttcatttat

SEQ ID NO: 299317 - DNA, 438 bp, Glycine max
  unsure (1)..(438): unsure at all n locations
ttgcacattanactccacatttatctctatagaaaaaaatatattaatacggaaccctagctacttttaaaaagacgcaacaagggaatgtttntctcttctgttctttacaaatagctaggataatgatttttgtacaattattctgtgtataacagttcctttgatttttgtgaaatatttttttgatatacatgtttatgaaaaaataaaatttaagtgagaaataaaaaaaaaatcatatatgataatgagataggatcgaagtntanaatttgatgaaaccttaaccgcagtgttagtagtaaaaagaatctttacacatgcaacaaanagtcgctaactgctaataaatatatcgatggtgacaagacatagagtacangctttggggttgttagttaaaacatgcttcacatgacgtagtaattacaaaaa

SEQ ID NO: 299318 - DNA, 412 bp, Glycine max
  unsure (1)..(412): unsure at all n locations
caagctgnggtctanntctaaggattgagcatggcataggaagggtttagtatgttgaatggtangaaaatttgataatgatcacctccacagactctntgacgctcaactttggaataagagaaataaaataaaaagtgaagattaagaagttcatatataaagggtaatacatctctatatagtgatgattttggcggaaaaaatattatgtactctgagagcatgtgacctacgaagcttattaataaggaggaaatccatgcaatctttgtgatatagagtagaaagtacatttaagaatgtgttgctgaacttgctcataattgaatgtagagttaacaattcaggtgacaagtataccaagtaatgacattatctatctggattctggagaatgaatatgagcatg

SEQ ID NO: 299319 - DNA, 279 bp, Glycine max
  unsure (1)..(279): unsure at all n locations
tagganaatgatcttagaggatttatatatgagcaacttgtgtactccaccctgggctgccaagatgtatcaggatctcacgacaatgttttggtgaccaaacatgaagagagaggctagtgagtttgtgtatgtgtgtatagtatgtcagatcgctaacatagaacatctgagaccctcatgtaagttgcaacactttgagatacccagaggaagtggaatatttttcattgatttcattgttgactacctaggacccccaaggtttcgatctatcta

SEQ ID NO: 299320 - DNA, 270 bp, Glycine max
  unsure (1)..(270): unsure at all n locations
acttccctcacgtactgtctcgtggggggtatgaactgcttgacaagaaacttatggaggagaagagcaagcgtggacatgaggaacattcgtgtactgaaagcccaacactcaacgtcgacccaccatccccagttgcaagacacttgaagtggaagatcgcccgcactaagcggcatggccaaatgacgtctgaagtggcacaagaaattgtagacanaatggtcaggtcatatatttttttggttactgtcattggcanataatggt

SEQ ID NO: 299321 - DNA, 401 bp, Glycine max
  unsure (1)..(401): unsure at all n locations
gcttgtgattatcatgtagaggattcatcanaaggagttgaccacgaacaacactataagattcattcaaccccatgagaaattgcatcaacttgcgtcttttgttgtttgcttcacatgtgcaaatagcatcattataggatcctaactcatcccacaatttttttttaactttgtatagtatgcagcaactatcatttgatcttaagtaaggcaagcaatctctctctcgatctggaaaatgagtggtgcgttgctttgaaagaaacaattttgaagatcttcccaaacttcatgagcagtgtaaanaaaaataacactatctgtaatatcaggggtcattgaattaagaatcccatgacaaaccatatcattgcattnttcatgctacatagtcttct

SEQ ID NO: 299322 - DNA, 331 bp, Glycine max
tgatgggtaccatgaggtgtttttgtgtttgacccacgcgggtgttgaagagacggcatgggcatctccttccttcctttttgcccctgttgccccgattcttttggcgttcacgtttgtggaggaaacgtaatcaaactttcctctcttcaatccaacctcgattctttccccggcaaacaccagatccgcgaaactggacggcatgtaacccagtatcttctcatagtaaaacactggcagagtgtctaccatcatggtgaacatctctctctcaaccatggaggagctacctgtgccgccaatccctccatcgctgcgcatattcttt

SEQ ID NO: 299323 - DNA, 426 bp, Glycine max
  unsure (1)..(426): unsure at all n locations
agcttgtcacttgtcagccgaatggagacttctgactaacgatccttagatgacaaggtactaccacatggctacttggcttanagaattcttcgccaattttgagctcagacacattataagagaaaacaatgagagccaacttgttgttaaaactcgccagtacaaagaagaaaggttaatacataatagttatcaaggaaacaatcttggaactaggcttggacaaggtggtagcgagtgtaactctcatttattgagcgtggataattgagatttacgacttcctggaaataactcactctcgaataatctagtagcgacaagaaagattaagagaaatgccagttattatgtgatagcgggaggatacctatacaaaagacgctntacaacctctctgttgaaatgctaagtcgggatcat

SEQ ID NO: 299324 - DNA, 213 bp, Glycine max
ttaccatctatcccagccctctccaagaataacttgtcatgtaaagaaagcggtcctatacaccaaatgtttgttaccactctctcagaccctattacatacatcttatacgactgctgaaaagtgatcaccaatatccctgcatgcaaatttccccagctttgaattgttcaacggagtgcatccaaacctgtcagtcctgactcattgccc

SEQ ID NO: 299325 - DNA, 503 bp, Glycine max
  unsure (1)..(503): unsure at all n locations
agaacgaaggggggtggaacgtacgcagcatgcgnncatanagnncgnccngggatnnttnagtcacctgcggcatgcaagctttctttattgcgtcacgtntannaccgagctcgatggtggtgcgagcctttgatggtactcngcgggaagtgatgggggaaatcgatattcccattcagatacgcccccacacttgccatgtggtgtttcaagtaatggatataaattccgcctataagctgctcttgagaagaccttggattcatgcnctgngagtggtcccttcaacgctttaccagaaattaaagttcgcagtgggtggacttttagtgatagtgtcnggtgaagacgatatgttagtgagcttccactcctcctcaccgtacatagacgtggcggagaaatcattgaaccggcttcttatcctttgnggggtgagctgtgcctcngtggaaccagtccgtcctacctttctctccacgccgcataatggtgcaccg

SEQ ID NO: 299326 - DNA, 136 bp, Glycine max
aaaagctgcatctacagcgtagaagtcacctgcagttatgttagctagcacatccatttctagtctgtatcttgttgttcatcaactagcatgcagtcctgaaatattatagaaatgacatatcttatggaagaaa

SEQ ID NO: 299327 - DNA, 186 bp, Glycine max
aatcactgtgtttgctcatgcgcttgtatcacatcttaaaccctaaatctcttctacgcttattctgtcgtgagaatcttaggaactcatgaaggctgttgggatcttaggtcatgtttgtgtctaatatggatgtcttggtggggacggtgattggacttcgactttacatgctggtcactatgc

SEQ ID NO: 299328 - DNA, 316 bp, Glycine max
  unsure (1)..(316): unsure at all n locations
gcttccttgggaattaanatgattaaagcttccttaagaagctagagggggactactcatatccctccaatagctaagttcacacctatgccaaaatacatgaaaatacaatgggaagcaaggaaggtagcttccttgggaagcaaggaagaaagcttccttgagaagctagagggggggcggtggctactcacacccgctcaatagttatgctcacccccatgccaaaatacatgataatacaanaaaataaaagtccctactacaaagactactcaaaatgccctaaaatataaggctaaaaccctatactact

SEQ ID NO: 299329 - DNA, 503 bp, Glycine max
  unsure (1)..(503): unsure at all n locations
aagcgtttcataccanngcttgcacnnncnnnnannaagaancngggatccttanagtcgagctgatagctgcagcttgtatttgttttcttttaatgtgactatgaggcaggcgcgtctttgagaaccaatccatcgacctctccatctcaaaactcaataagatataagctccacacatctcagctcaaacccaataaatggagctagtatgatagatagaacggcttgctataaactgcctgccacacaagtaatcgacattatagatgggaaatctgtgacaacttctttctgtcagagcaattggagaccacttaattgaacccactgtatgctatcgccactacattaacttttttctaaggatcaagtataggtataaatatatatgtattaactttatgataactaagtttcatccacacaaccagcttggtcaacctttagtgaaaatatccttctcaactatgtattttatatctatataaccaaaccacaag

SEQ ID NO: 299330 - DNA, 379 bp, Glycine max
  unsure (1)..(379): unsure at all n locations
cactatanaaatactcccaagcttgtagggattanntggggtacccatcacaatgtggtactagtgtggtctgtcgggcgaatggtgcaaaacgattctccacatccataaatcacgtacaaacccaccatcccctgttgcccacctccaattgagctcacgtactcccacgtagcccttatcctcgttcatctcaacgccgagtccccatcaatcctcccaagctcccacaacatccaattaattccacatccaatcatcatggactaacaaaaccaagcaaaacaaggcaaaggcagaaaactctgcccaaaacacaacccanaatcacagcttttcacatacaaataccccagtaacatttccttcgttcgaattc

SEQ ID NO: 299331 - DNA, 409 bp, Glycine max
  unsure (1)..(409): unsure at all n locations
catgtttgctttgcttctgtgatgatgtggcaggagcaatttctgatggttttaaaacaacagcattaccagctgcaatagctccaacgactggatcaagtgacaacactggaaagatagacagagaatgtaatatagatnttgcagagattggaggaaagaaaaaggtgagatgtcagctcaaaagtatgtgacacaataccaactacatattaacatacagaatgggtagttccatgcagagatgactaacacaacccccagtggttcagatactatttcagctgaagatggaaatagtgcgattgaagtcttgacctgcaataaaagggaaattcatgtgataaatcataagtaccaaacaatgtcagcaatgaaattcacataatgtatancctttcaggagtca

SEQ ID NO: 299332 - DNA, 318 bp, Glycine max
caacatatatatgttcatccattctaagctatccttttttttttacatatgttgtaccaggcctcccatccctctaaaagtgaccctaattctcattttaatactaatgttgccccataaggaaatgccaaatatgtttcccagagataaaagaaacatgtctctcaaagttctttgtatttctatatatggccatattctctaaatatattaatagattatttactgagagaactcaagattcctagtttaaaaaagaagtcacaccattagccctctgttttattcttctctatgatgtcgtttggattcttctct

SEQ ID NO: 299333 - DNA, 419 bp, Glycine max
  unsure (1)..(419): unsure at all n locations
agctntgagcttattcttacgacaataactnttgattcggatgtccgattgtgtcccgtattatatcgagatgctcgtaattgaaaatagaagctctgagcaaattcaaacgacaataacttttgactcgggtgtccgattgtgtcccgtagtatatcgagacgctcgaaattgaaaacagaagcactgagcaaattcaaacgacaataactttttactcggatgaccgattgagtcccgtaatatatcgagacgctcgtaattgaaaacagaagctctgagcaaattcaaacgacaataacttttgactcggatgtccgattgagtcccgtaatatatcgagacgctcgcaattgtaaacagaagctctgagcaaattcacacgacaattactttctactcggatgtccgattgagtc

SEQ ID NO: 299334 - DNA, 419 bp, Glycine max
gacacatagaaactcaagctgttcttgatttttctaagttctttaacaagcttagatcaatatacttgtccttcatttaattgtctttgggcttggcggcctcgatcaacaaagtactttcggcacctactatatgttgacttgaccaacgctcttatcggtatgctgcgacaatccttcaacaccttattcacacattctgagaggttggttgtcatgtgaccatatcttcgtccagatgtatcataagccatggctccattttcctttgaaatgcgatcaatccatgtcgctatggctggactcaattgacaaaatttttctaagttttgatcaaacacatgcttgcaaagagtgtacgctacatcacaattgttaccatcaaaagttgaggtagatatgaaactcaaataacttca

SEQ ID NO: 299335 - DNA, 423 bp, Glycine max
ttcttgctcatttgtttaataaacttaagatcaatagttattataaaaaattctatcaataaaattctcacatcacactaaaaatcaaatttgcatccttataaaatatgatttctatccttataagtggactcacacctttgttggttatctcatactctaaatatgtatatgtattggttctgtcatcaacaataaccctttgcaatgtcaagtaagattgtttctactaaaaaaatatgtgatatgtggcatagtaataaaacatattgattaatgaagatcattataaatttagtataaactgatactggaaatgattacaagcgtgggaagagaaaaagagtgatgaggtagtgcttctgcaataatttaccaacaggagcagttggcagtagttagtgcgtcttttaaatgatacat

SEQ ID NO: 299336 - DNA, 339 bp, Glycine max
  unsure (1)..(339): unsure at all n locations
tatcctctacgacaatcaactcggcggcaaaattcccggctctatcgggaaccttaagagccttcaagtgataagagcaggtggaaacaagaacctggaaggccttttaccacaagaaattggcaattgttccagtttggtcatgttgggtcttgctgaaactagcctttcaggttctctacctccaactcttggcctcttgaaaaaccttgaaaccattgccatttacacttccctactctcaggtgaaataccacctgaacttgngtactgcacaaggcttccaaacatatatctttacgagaactccctcactggatccataccaagcaagttggg

SEQ ID NO: 299337 - DNA, 424 bp, Glycine max
  unsure (1)..(424): unsure at all n locations
agcttgaacttgctgtattttctacttttctagtgatttcatatgagacattgtgttcattctgttttatctgaatataatttagtatatacacaaatattgattttgatatgctaatgagatatgctatttgcatatttagaatccatatggcagtttccttgacgaggactataactgaaagccaaaacgtgtttcccatgtctatctgtcttgcaaggcggatttctgatcatggagcttcaagggtagggatactgcttcttaaacgttgattcaattattattccttactccttggtgtaaaataccttatatcntaataaattttatgctggtttatactttatgtnttaacttgtcaaaacaaaagcaaaccgccatgtatcgaattggtcgggatttcatcttccgaaactcccct

SEQ ID NO: 299338 - DNA, 502 bp, Glycine max
  unsure (1)..(502): unsure at all n locations
ggggnnnnnnnnnnttgggacagtcagactcngcaatcactcgaccggggtctctgagtcacctgaggcatgcaagctctntgtataatctttcttggaaagctagagctagctacacacacccctctaataactaagctcacctncttgagaagcntncttgagaagattcctagagaagctagagcttaactacacacacctctctaatagctaagctcacctncttgacatgagaagctagagcttagctacatacccnctataataactaagtntaaccccatgccaaaatacatganaatataanaaaagtccctnactacaagactactcanaatgccctgaaatacaagactaanaccctatactactagaantggcaaaatacannggccanaaaangganaacctattctatatttataaagngagtgacccaaccttgctcatgggctagaatctacctgtgtcatgagacccagggcctcttagcactctn

SEQ ID NO: 299339 - DNA, 387 bp, Glycine max
  unsure (1)..(387): unsure at all n locations
aatactagcttaggttttcctgcttttttattctnctacctcttttctttcttcccttagaaacctttcttaagtttaaaatcctgcgactacgcgctaagcgcgtaagctagctaagcgacccatgtgcgctaagcaccttttcacttgactgcaggtgctctatgctgcttcttcgccctgagcggacaccctcccactaagcaacaatagctcgctaagcaagtccgacgcactaaacacaaaccatcatgcttcaacttctctctttatcccttgcttggatatctacaaaataaaatcatcaaacagtttgaattaacgatttaaggtacctactgcgcaaatacttcgaggatattaaaattataatgattcacacaaaaa

SEQ ID NO: 299340 - DNA, 154 bp, Glycine max
tctggtgggacatcttgacttgctttctaatctgacattcatttcagattctgccttcttctatgttcagattgggaatgcctctagcagcacctttgtcgatgattttcttcatgcctcttaagtgcagatgtgcaaatctttgatgccatat

SEQ ID NO: 299341 - DNA, 398 bp, Glycine max
  unsure (1)..(398): unsure at all n locations
catgtntgtcatcatcaaaaatgcggagaatgtgaatgtattttgatgatgtcaaaagaagaatcaaaccaggctcattntgcttcaaattaatacaagattgttcaacaaacanagccttgattcaagatttcttcaagatcaagtcgcgcctcacaatgaaagggttcaagtcattcaaggcacatgtaatcgattaccaatggtttgaaagtgtgtgatcnattacacatcatantgtatcgactactacagactctgaatgtgggaattcannatttaatgaagggcataactgttcangaaaataactgtcgtattattacactaanntctgtatcgatttcagagaggatntcacggatatcgccacagcacatctatcattcgattttgag

SEQ ID NO: 299342 - DNA, 242 bp, Glycine max
atgacttgatattgacttttcgggaatgcacagacatctcacattcatcaaactggtccagtgaaggatgtttgggaacagttgccggtctctcataatgagccgatgatgttcatcatcttggctgaccggttgcgcactgctggggataatgtgaaaattacccacccttgtctaagtccactctttgtcaccggctaatggttatacatggacattttcttgcccactttgacagtctc

SEQ ID NO: 299343 - DNA, 241 bp, Glycine max
tatgcagttattccccccaaccacaagaaagcaaaacccttaaattccatacgaatcaaaatcctcaacagagtttacaaatccgaaacgaatagaagaaattggaattaaaagaaaaaaacaaattataaaaagaagaacaaactaactaattggatcgtggtggaaacggtgtgtgatgcggctgattattttcgatcctctgttccgtgcttcagagagaacacagaagaaatgattt

SEQ ID NO: 299344 - DNA, 339 bp, Glycine max
ggattatatatcagagtgttatgatccagccttaaccataatcatgactaacataagctatgtttaataagacattctagttaatttcttatttttattaggtgaaaaactcaattgtgcaataaacaagttcttataatacctactaatgcttgatattctttttaatgatacattttttaagtactttaacatctaattttacttaacaattctaatataactaattagtctttaactgcttactatcaattagttgttttaacttctacctaactttgtaacttctagctaatgttgcaaacgtaatgataatcaccaatttggtattctcttact

SEQ ID NO: 299345 - DNA, 488 bp, Glycine max
  unsure (1)..(488): unsure at all n locations
nggctgtaagaccatggcnagcacatcnngcaattcagctcgacccggganctctgagtcacctgcggcntgcagctttcttgtttgtccatcngngacaattaactgtaaagtgggcccaattggattctaatttcaacttacctatntggaagtgacatcatggcagttaggtcccagctntccattgtggattcagtcacanaaccaacttcaatatgtnggactatctaacacggngatnttcgattctattcccacacacgatgtgggaagcaccttctcanggtttgtatntaaacctctctcntaatcatatccatggtgagatngnactacattaangaatcaatatctatccaaatattgatctaagctagatcactcgtgtggtaattaccctatctttcacgtgatgtgctcnngtagatctntcangcattcattctctgatccatgaatgacttntatgtacnatcangacanca

SEQ ID NO: 299346 - DNA, 487 bp, Glycine max
  unsure (1)..(487): unsure at all n locations
tgaccggcgaanagttgagaccctggtagaatccgataccnctgtaanaacacngcnnnggggatctactacgcttgtagaactatggatgctgttcaagcaaattacactatcttagagaaggagctattatcgatagcttttgctcttgagaaattacgttcatatctgcttggtactcgtgttattgtttatactgaccattgcactctgaagtacctgttgaagaacgctgaatcaaagcctaaattgatcaggtggatgctttggatccaagagtttgatttggagatccgtgatcagatgggtaccacaaactctttgggtgaccacctgagtatgattgagcgtgcgcctgatgactcacccattcgggatgaattttcacatgaccatttgtacattttgtataagatctctgattccgtccccactccatggtttgcttatattgcaattatatggctgctcatgttttcctccctcn

SEQ ID NO: 299347 - DNA, 312 bp, Glycine max
ccggaatccattttcggggaaaaatgtatagactgagaaaagaaaaatcaatacggcgaatgttttgtgctagcaaaactatgggacctgctttgtggtactactctggtgtgaaatacggatttcacattactgatattgaatttggctcattttttatagacgatcgtcagaactctcatccttggtctcctctatttccctcgaagtatgactctaatcttgagtcttttcttttggtataaactaatcttgagtctgaatgggtggttaagtaaatttctaattgaaatgatactctaatctaaaatt

SEQ ID NO: 299348 - DNA, 356 bp, Glycine max
  unsure (1)..(356): unsure at all n locations
aatcacatgtntgtcatcatcaaaaatggggagaatgtgaatgtattttgatgatgtcaaaagaagaatcaaacaaggctcattntgcttcaagattaatacaagattgtttcaacaaacaaagccttgattcaagatttcttcaagatcaagtcttgcctcacaatgaaaggtttcaagtcattcaaggcacatgtaatcgattaccaatggtttgaaagtgtgtaatcgactacacatcatatgtaatcgactactacagactctgaatgttgggaattcaaaatttaaatgaagggtcataactgttcaagacaaataactgtgtaatcgattacactaattctgtaatcgat

SEQ ID NO: 299349 - DNA, 372 bp, Glycine max
  unsure (1)..(372): unsure at all n locations
tgagcgaatccaaacgacaataactgtgtactcggatgtcttattgagtcccgtaatatatcgacatgctcgaaattgaatgttgaagctctgagcacattcanacgacaataactttttactcggatgtctgattgagtcccgtaacatatcgagacgctcgaaattgaatgttgaagctctcagccaattcatacgacaataacttttttctcggatgtctgattgagtcccgtcatatatcgagacgctcgaaattgaatggtaaagctctgagccaactcatacgacaataacgttttactcggatgtctgattgagtcccgttacttatcgagacgctccgaattgaatgttgaagctctcaaccaa

SEQ ID NO: 299350 - DNA, 406 bp, Glycine max
  unsure (1)..(406): unsure at all n locations
tgctttgaatattggtctttgccagtgaaaggatcgatgtgggtatgaaaaaaggcaaatttagtcatcctgcttggacgaatgagaaaactggggcaaatgaagagggtgagaaagagggagaaacccatgctgtgactgccattcctatacggccaagtttcccaccaaacccaacaatgtcattactcaatcaataacaaacctcctccttacccaccacccagttatccacaaaggccatccctaaatcaaccacaaagcctgtctaccgcacttccaatgacgaagaccacctttagcacaaaccaaataaaacaccaaccaagaaatgaattntgcagcgaanagcctgtatgattcaccccaaattccggtgtcatatgctaactttgctccatatcta

SEQ ID NO: 299351 - DNA, 422 bp, Glycine max
  unsure (1)..(422): unsure at all n locations
agcttgcttctacaatctccccctttntgatgatgacaaccctgaaatcaagaaacacacacacacacacactttttcctagtcgatcactcacttaattctccatattctccccctttgtttttgagtttatgcttcacttgaaattaagttaattacttatgtgagttcttgatttaatccctatttctctccccctttggcatcaacaaaaagccaaagtgcgtaacaaatataaatcatacatacattactaatcattcacaagacattcattgaaaaatctaaaccaatcatgaagcaagaaacatgaatagatcanatatataaaatccacatagtcatataacacaattcataattgttcaatcatactatgcaaataanagaaaatactaaatggtcanatgtcataataatat

SEQ ID NO: 299352 - DNA, 390 bp, Glycine max
  unsure (1)..(390): unsure at all n locations
tctcaaacattaatntaaacaataaatgcacaacttagcatgtttagtggtgccaatagcagttaaaatcactaaacaaattcacatgaaaggaattgatttgaactaatgaacaatagcaaacaaaaggaattaattgatgcacaagcaccaagagcaatacaaattgatgctaataataatgacgcaccacatagaaattagaagcaaaaattaggctcaaattggaatatgatgcaatcacaaagagaaaggcactgaatgaattcaanaaaaaaccgacgcatggtattaaaatgctataacaaattaacacaatatgccacaagtaggtgacacacatccaattgatatttgattgatgcacttcatacaaccaatgcctaattc

SEQ ID NO: 299353 - DNA, 361 bp, Glycine max
  unsure (1)..(361): unsure at all n locations
agctcgacccgggtcctctaatcacctgcagctgcagcttcaatttcaagcnaacagctaaagaagaaaatgtgggatcctgtgnaaccaatggtgcttggaaagaagagttaaaaactgccgttaataattatgcttctgtcattacagaacttgatgttgcaaagaaagaactgagtaaaattcgtcaggggtatgatttatcctcggaagcaagagtttctgctctcaagcgagcatcagaagctgaagatgcaatgaatgcatacaccataagagcatgtgagctatctaaagaaattttggctgtacaggaatcatttgagaaaacgaatgctgaatntgtccaagcacatcaact

SEQ ID NO: 299354 - DNA, 393 bp, Glycine max
  unsure (1)..(393): unsure at all n locations
agcttgaattttatgttgatttgacagagagaaatacttgtagcttgttgaagttactagaatttggtggtttgctataagaacttgacattgtcttggtggttgagatgaaccaacataaatntgatgtgtcttattcttttttatttctcttttgctatttgatctgttagggtttgaatttgatctttattatttaaaaactttgtttgttttacaaagatttgaaactatcatcttatttgttntgcaaaagtctgatatctgttttgttaagtcttacttcacaagacaataactntattantttacgaaaaaattatttttttatgaaaattacaattcaatcttatttcttgtaatatttatttttgcaatattattatattgtat

SEQ ID NO: 299355 - DNA, 431 bp, Glycine max
tcctcggtgccattcactgcgattgctaacatttggaaagctagtttaccaagaaatgctactcttaaaacaaatatggcatacaacctcctccaataaacacaaacatcaatgtaaatttagagcaaactcatgcacatacttccttatgaacattcactcgcacaaaatattcttctacctaaaaaaaatgcacccatgcgcaatcaaagcacctttgttacctagatatatttatgtgtacttccaaggtgtatttactacttacatcacatgcatttccttggctaaatgtacatacatgcatactcaaagcatcttggctaccaaaaattgcacacgtgcacattctggcatttctagtacctatgcatatacaaactatgtgatgaatctatgctatctacacaataaggtgctacatttcatgc

SEQ ID NO: 299356 - DNA, 381 bp, Glycine max
  unsure (1)..(381): unsure at all n locations
ntagcttccactcgtaagaccatatgccactagaccagtctattctagaatatagaaaataaacttcatggtctcgaatacatgtagcgtgcctaaactntgaggtgtaacatcccaaaaataatctaataattatctagataaagatatttaaatatatcttttattacacgacaagatagattaaataatttaaatatatcatataatgatttttatttcgaacagaggttactataataatatataagatttggtaacgataaattaacgataatagaaagtatagataaagaaggatcatttaacagattgcaaattacacacaattcttaatatatggttgacagtctttctcttagaacacacacataaaggatc

SEQ ID NO: 299357 - DNA, 403 bp, Glycine max
  unsure (1)..(403): unsure at all n locations
tcacttgcgactggttataaactacaacctttaaacaacaacttgcaagcaattaaaattcgtgactttctaagagacaattgtatcttgactccacgatctagctcttgaatcatcttacacaccctttgtaacctaaagtacaagaattccctaccttccccctcattgcattattacatcgtcaagcacattctatataagttatgaccctatgtatcatctaaaccctgtaggagatgtgagaagaaactcatatataaacatacgtttaataaacctatataacactgatngagatatccttacggatgcttatctggatatcttagaattacattgcttcggtgcttgaaacgccaacccaatatccacattcatatctctcactgaaataggacgc

SEQ ID NO: 299358 - DNA, 370 bp, Glycine max
  unsure (1)..(370): unsure at all n locations
accaagtgtgtctaacttttcctaagtctatgtttttgcgttgttgcgctaaacgcaccttgcgcactaanggagtactgttatttttataaggcacgctaagcgagccagtctcgctaagcgcccaatctattttttagttttatttttctgctttcagttaaaataaaagcatgtctaatatgattattgtgcttattttttatgcagatgacctccangaagaggaaagccatagcctcccgatcccgggaaccatataacaccacccattntgtttntgaggtcgcttangagcgatattctcaaaacattcacaccaggaacatccttccagagaggaatgttaatctttttgtgatagagtatg

SEQ ID NO: 299359 - DNA, 323 bp, Glycine max
  unsure (1)..(323): unsure at all n locations
gcagctttacattaatttcagctctcgattgtacgggctgatcagacatcgagtaaaagtattgtcgtttaatttgctcagtgcataacattcaatttcagcatctcgatacgtgatgggactgaatcagacatttgagtaaaagttattgcgtttgaattgctcagtgatgaacattcattcagcgttcgattataccgactcatanacatcgagtanaagatttgtcgtgatnacttaagctcacattcattcacacctaattgtacggactgatcgacatcgagtaaagtattgcgttgattgctcaactcacattcatt

SEQ ID NO: 299360 - DNA, 250 bp, Glycine max
  unsure (1)..(250): unsure at all n locations
tctttgagcttcattgttgtcctttaatggcgattntccaccatggagatgcatcggaagacaaaggagaataggtaagaggcgacgccatccactatggaataagccatgaatgagcttcaccacgaagatgagcaaagagagtgttggatcgagtggcctcanaatcattaagaaggcggggggggtgaattaattattcctaaacctttactaattaaaaaattactcttctaatgcttttacttat

SEQ ID NO: 299361 - DNA, 366 bp, Glycine max
  unsure (1)..(366): unsure at all n locations
cccacaacaacaacaacaattcatcaacccacgatggagaagaagaagcggtgaaacccgaccagctgttcaaggaaaccgcagagtacatcgtgttgctgcggacgcgcgtcgtggttctccagaaactcattgagtattatggaaacaacaacgacaccacccaagatgagaatgaacatgaagatggtgtcttgtttacatagctntttcactctcttcttcttcttcatcttattattattattattctttttggttttcttcttacatggtttgttttgtgacttttgtcctttcattaatgaagaaaaaaacaaaagacaagatctttggtctagtgttttttttcttggaggggggggg

SEQ ID NO: 299362 - DNA, 369 bp, Glycine max
ccaaaatcatgagcacgagaagagtctgttttcttattaatacaattcattgtatatgccgtgatcactcaacattccagtcttatgtaagaacatattatggattaacggacaataatacctctatgtctgagatcgctctcacacaataggctcagcatgtgggcgcatagaaagtggatagtggcaaaactgaatacatgctgctatatacaattaatagactcccaattgtctattatttgaataagacctttgatctttttctaaaataagcggagctaaaagattatctgtttttgatgtcaatattgaaaatagtactcttggctgataaaagtgaaaaatgcataatgccggataaaatat

SEQ ID NO: 299363 - DNA, 346 bp, Glycine max
ttcgaatggtcttatacttttcactcggatgtccgattcgcgggcataactcatctagatgctcgaaattgaacatcggaagctctcgagaaattcaaatggtcataacttttcacacggatgtccaaatttaggacataatatatcgagacactcgaaattccacaacggatgtactcgagaaatttgaatggtcataacttttcacacggatgtccgaatgtgggacataatatatcgagacgctcgaaattgcgctacggaagcactcgagatttcgaatggtcataacttttcacacgaatgtctgattcgcggacataactcatctagacgctcgaaattg

SEQ ID NO: 299364 - DNA, 380 bp, Glycine max
agcttcaacataataaagactttctcaagtcaagaactatgatcttcttgaggaactctaggtttcaaatcgtgccatagtaagcatgggatatattgaataacaattacagggagaacccatgcattgatcttaatgatgtgtgtaatgagacaatgaatgatgcacaattcgaaagctttgttgatattttgtcaccccttggaaattgttgctcttttagtctactggcagttgaatcttttccctctgcttcaatgccctctcagtcaatggcattggcttcaactaggacttctacaccatgtgggacaaagtgtaaagttgttatggttgatgtcactgatacacaatttgatgagttcaacacaggtcttgat

SEQ ID NO: 299365 - DNA, 316 bp, Glycine max
tatgaagagagaacaatttagagagtgatcgaagactttcaaatggatttccactgaatttattcatagagagatcgagatatcttaatgatgaaagttttccaaatgatctaggaagagcaccaccaattgagttgttggaaaaaagtaacgtgtcaatatttttaaatgccccaatatgatctgtcagattgcctgaaagtcgtgaactctgaactgcaagtcttgtgagtccatgggaaatacaaggagcaagaatttctaaaagttcattaacctgttggttgagtttgagatatgataaatctatcaccct

SEQ ID NO: 299366 - DNA, 366 bp, Glycine max
  unsure (1)..(366): unsure at all n locations
ttgcttcctccagaagcaaaagccttctggaggaatcttctanacggcccaagtgggcttggatgctatttgcacccccattnttactaattacacccccttgctttttttggtgattctttattcgtaaagttatggaaacttacgaaatctcgaacgatacttgttatcttttcgtaatgttacggaaccttgtggattacataatcatccccttattgacttaccgaatgtatcggaacctcactaattgagcaacgatgcttccatttgaatatccgcgtgtcacggaaccttgctgattgtgcatcaatattttctattgatttctggcacgtnccggaatttcacaaattgcccaatgat

SEQ ID NO: 299367 - DNA, 120 bp, Glycine max
atgaatgatgtgataatatgctgcactaaaaatcttaactcgtaattgactaactacaaaatgcatatattatatcatagactacactcgatattcctgaatcatctaatttgagtacaa

SEQ ID NO: 299368 - DNA, 426 bp, Glycine max
  unsure (1)..(426): unsure at all n locations
cgcatgttatctntactaatagctatagacatatttgaagaccaactataataatgaatctggaaattcctttcccaacccctcagccaggtccatatgagaaacagagtgctatctgtcagtctagtgatatcaaaggtttgattctggaaaattatatcatttctgagcctccatattgaggttgtaactgctatccaccacattgtccttcttatgttagcatcctttgaaactgctgaggagaaatgctgaagacaattgtccaaaggtctgcagtgaaacaccttttcttcctttatccaagataggaattcccaccatataggcataattntgccacaagtgaagagtacgtgggaagcagttcaggttgactatgacagaatggcataaatattatgcacctgaatctgcctcttaatc

SEQ ID NO: 299369 - DNA, 349 bp, Glycine max
  unsure (1)..(349): unsure at all n locations
gcttagctacacanccccctataatagctaagctcacccncatgatataatacatgaaatacttaaaagtccctactacaaagactactcaaaatgcctcgaaatacaaggctataaccctatactactagaatggccaaaatacaaggcccaaacaaaggaaaaacctattctaantattacaaagataagcgggctcaaacttagcccatgggctcggaatctacccttangctcatgagaaccctaaggccttcccttggatctctggcccaatctacttggtgtctattatccaatgcccttgtggngtaagatngcatcattccctccaccttggaaaggattt

SEQ ID NO: 299370 - DNA, 313 bp, Glycine max
  unsure (1)..(313): unsure at all n locations
agcttgttagaactatcatcacatgacgctntattggcacagaataagttgctttctaagcaacttgagattttaacagaaacacttggtaagttgccaactaaactgtctattggtcaaccttcacattcttctattttgcagattacaggttgttggatcaagtggcctcagaataattaagaaagggggggggggttgaattaattattcctaaacctttactaattataaaattactcttataaggcttatactatgttgttaagtgaataaagagtagaagagaaacttaaccaacagttaaagcgga

SEQ ID NO: 299371 - DNA, 382 bp, Glycine max
tataaaacccagcttgggaaacaattagaagggaggagaactgatttgttattttatgaatattatgtcttataacataagggggcttggaggtagactgaagaacaaagaggtacatagtttaatttctaaatataagttaaatgttatttatgagcacgagacaaaattggaggagatcaatagtagtttatattctttgttgaggagttgagatgattatgagtttgattctaaaaaatcagagggtcggttatgggattttatgatgtggagaaaagatcttttggttgtaaaagaggtggtgtataaggaacattggttatgattaattggtgtatgtggcgttgagcagattgaagtgtttattgctggggtgtat

SEQ ID NO: 299372 - DNA, 377 bp, Glycine max
  unsure (1)..(377): unsure at all n locations
agcttgctaatgtgttgcataccaatgagctcgcaagacggctaaaggtgatgacttatttgaggttactgagtatatgttatacctgctagtagtctgtttctgtatgtgttgttctgttttatttacccctgcaaaataaaggaaacatgagaacagggaaacaggggactaatccagcttatcaggaaaatggttgtggaggtggtctactgacaccaacagtttgtgagatgctatttgtttatgtaaaacaaattgttgtgagtggatcaactggagttggggtttgtaagatantttcctgagggtgttgtttgttgataaaagagtaacctttgganaattgaattcttattcatatactctgaaatgac

SEQ ID NO: 299373 - DNA, 252 bp, Glycine max
  unsure (1)..(252): unsure at all n locations
ttatgttgcanatatttacaatagacctcctcaacctcattatctaaatcaaccacagtttatcaattatgacctttccagcaacagatacaaccctggatggaggaatcaccctaacctcagatggtccagcccttatcaacaacaacagcagcctgctccttccttacaaaatgctgctggcccaagcagaccatacattcctccaccaatccaacaacagcaacaaccccagaaacaaccaatagttga

SEQ ID NO: 299374 - DNA, 380 bp, Glycine max
  unsure (1)..(380): unsure at all n locations
agctttcttgataaaacttccttgagaagcttctttgagaaaacttccttgagaagctagagcttagctacacacacccctctaataactaagctcacctccttgggaagcttccttgaaaagattcctaaagaagctagagcttagtacacacacctctctaatagctaagcttacctccttgagatgagaagctagaacttagctacacaccccctataatagctaagctcacccctatgacaaaatacatgaaaatacaaaaaanagtccctactacaaagacaactcanaatgcctcgaaatacaaggttaanaccctatactactagaatggccaaaatacaaggcctaaacgaaggaaaaaacctattctaata

SEQ ID NO: 299375 - DNA, 346 bp, Glycine max
  unsure (1)..(346): unsure at all n locations
tctcccccaattntctataaatagggggagaagtgatgttgataagggtccagccccttaggcacttgtctctctttcgaatttgctcggaaaaattgtttccgtgaagaaaatctaagccgaggcgcttgcgaaacgtttccgtatcgttttccgtgaggaatctcgcaaaggtttcaaccgttcttcgacgttcttcattcgttcttcatcgttcttcgatcttcaacgggtaagtacctcgaaccaagcttttctattcattctatgtacccgtagtggtccacattgtgtttcgtgcatttatattctcgttttgttactttttattacccctgttgcatgc

SEQ ID NO: 299376 - DNA, 380 bp, Glycine max
  unsure (1)..(380): unsure at all n locations
agccttgaatttatcttttctatgtcttgaattgaacctaatctaattatcaaatattataaatcacatttcgttgtgggggaatgtgaggctcanagaacattgtgtattttccatctctctttgcagtgcatatgatagagcggctattaaattccgaggagtggaggcggacattaacttcaacattgaagattatgaagatgacttgaagcangtgatcaatttgtgaatatttatattttgttntatcttatcttgaacagtcacacctcatacgtataggatcaccttatctcctacagttagtgctatnttttctgtcttgaagtactctcatgaatttgttaaatgcaatgttaatagatgagcaatcttac

SEQ ID NO: 299377 - DNA, 391 bp, Glycine max
  unsure (1)..(391): unsure at all n locations
tctctactaccaagagcagctcaatctgtgatataaaataatgtaagagaatcaattaactaacacccaataagaacatcagaggaagtgatgggggataaaaataaaatgtcatgattcatatacagacagacaaagatgaaagtcatgcataggcttattttctgagattntgtgaggcanganaaaagacaggcaacaaaccctttgacagactcaaaatgacaaaatagaaagacaacaagacaaaagggcaagtaatttgatggtgaggagctaaggaacatactgtgttgaaaaataaagggtgaaattaaatgatntaggtagttaataagtgaaacctgagcangagaaataaaatcataatatatgcaatattgcatggaat

SEQ ID NO: 299378 - DNA, 348 bp, Glycine max
  unsure (1)..(348): unsure at all n locations
tatatgcctagatatcaggttaatttaatttagcttatnttcttattangttttaattactttttttttctgtcacaaattactatatatgcactgtatttcatttcttaggccgcattaattagtatgcatttgtttaattaatttctaaatatttccacttctttttcatgtgtgctactacacagtctacactatagtttgtgtatgtatgagaaagatgaacactaggttatgacgtgtacgaggagtttgaactgtgagtcanattactctacaataatagtaatatctaattttatcctctataacaacgcaaagctagaatatacccccaattacatggat

SEQ ID NO: 299379 - DNA, 379 bp, Glycine max
  unsure (1)..(379): unsure at all n locations
gctattattgtgtgtagagggagtgatgaacataggatgtcttctctcacaacttctacttggttcttttgggatcttaggttgaaagacattgattagtgaatgttttgagaaatgatacacctctgtattttgacagagtaactacccacgagtttgacagctaatagatctcattacatcattcacatatgtcattgttatctaacattgttccctcagtctatgggttacaacaattgtatattcttctctttattctcatataggtaccatttgaagaagctccagagcttgttgatggacggtatgtgtttattaatcaatgatatgcatatgttgcaatgaatcanggtcactagtgtcattacttctattt

SEQ ID NO: 299380 - DNA, 247 bp, Glycine max
  unsure (1)..(247): unsure at all n locations
gctttcactttccaagcattaatttccaacatcatgaactacctaactaggaaacagagtaaggtnaaaaatctgccaaaacacattcacatcttacagtttcttactcaaataccccagtacattcctttgtccgattcgtaccgtggatnacttgaaatttactggagattctagtcataagtnacattntgaccgtgggatctgtagaaatgtcagaatcaatatgtactacctttccataacc

SEQ ID NO: 299381 - DNA, 422 bp, Glycine max
  unsure (1)..(422): unsure at all n locations
gcttttctttgcttggctacaaaatcattggtttgtctaggaacaaaggatagatcctaagagagcacaaatcctatacttatccaagtgatccttttttatatacaattgcttactcactagcttttcactttcatttgcttttgaccttattgcattagcacacatttcctttgattggtttctttattttggttcttcttctctatttttaaccacacaacttatgtgttgggagtgctgatgctatatctatttctttgcatcccaattagtttcacctccccaaatttggggtaaatttgccttgaaccatatgctctcctacaatctaaacaaggtatcttggagataatcatttaggttcacggttcaattatggacaaaatcattcagctcacanagggtgcatatgatacaat

SEQ ID NO: 299382 - DNA, 423 bp, Glycine max
  unsure (1)..(423): unsure at all n locations
agaccncgtgctgttaaaattgaganccatgnagnnatcttgacactttagtannaacnnnaannnnnggaagggagatgtatcgtaaactgaagcgaatttctgttacttcagatagttttctttgtgagtgtgctagaataggagctttgacatgtggaaaatagatccatgctcatgcattgagaactggtatatctttatggtttataccatgcatatacatacgttgttagggggaaatagaatagctggaaaaattttgtagtgacatgaataaacatgaattttgtacagatatgaaagtggaacgaccatgctactggctttttaagatggtagtaacgtgaactatgaattcttattcatgttggctgcgcacaagttgggcaatgttaaaattttcagatggttagacttttt

SEQ ID NO: 299383 - DNA, 312 bp, Glycine max
  unsure (1)..(312): unsure at all n locations
atacttgtaatttgttgaagttagtgacacttcgtgaattatcgataactagacgtagtctcggtggttgagatacactagtataaatttcttgtgtcttattctctcttctattattngaactggcctacggtttgaatgtgatcttcgcttttgaacaactctatttgcttacaaagatatgagactattgtctgatctgtcttgcaagaattgatatctatgttcttangtgtacttcatcaacactatcttgatgtattcaaaaaggtttgagtttataaatttgtaatgttacatacatgatttgat

SEQ ID NO: 299384 - DNA, 324 bp, Glycine max
tcaatctgccatagctactcagttcgccaatctccctcaaatgctactacacaacctacaacaagctcagcaaaacatgttgggtgttgtcatccaaccacctcccattatccaacaacaaccaactccaagtatattgcttgcacctgttgaaggaaaaccatcatcacccacaataacaccaccagtttcagcaccaacaccaccaccgaccaatcaagagtgacgatgatgtcccatcataattactttctgtcaatgacaaaaggaagagaatgttatagaaatttgatttatgtaaatacgacactcttataaaataca

SEQ ID NO: 299385 - DNA, 117 bp, Glycine max
ctgcaactttacttggtttgctccggacttaaacccgtgcgacacactaatttaaaccctcccctctttacagcacccctctcatcctaaactactatccctggcaagacgactagg

SEQ ID NO: 299386 - DNA, 338 bp, Glycine max
  unsure (1)..(338): unsure at all n locations
agtccatagttccaatcaatcatgctcagtatgatgcatgcacctgacctcaactctcaaacgtaatgtggtaccatccccaaggaaatagtctaagcgttgtagaagcaaagcttccaagattattttgatgatgccaaagattttaaaaagatgcattcaaacaagattaaagaaatcaagaagattcaagtgaagattcaagagaagactcaagatatgcaagaacctcaagaatagctcaagatgagataagaataatntttcaaagaaaagaatgatagcacaatttgccaaagaaaaatcttntaccaaagttttttactatctggtaatcg

SEQ ID NO: 299387 - DNA, 326 bp, Glycine max
  unsure (1)..(326): unsure at all n locations
aaaaatttcttggatagattgaagtctttggtcataagttttatttacttatgctgccacttgtgacaacattacatcatacccaaatctgtgtgcaatttcgatgtttgcagtgtggatctgtctatacttctctcttcaattcttttcaaatttcatactcttcccaatagagttgtttgcagtttcactagcagacgtccaaactaataactatccaataaatttcaccatcttatcttcatgattgcaaatctatctaccggctaagataaattataatataggttttctaatgtatgtgatctctntgactaatatgacag

SEQ ID NO: 299388 - DNA, 127 bp, Glycine max
atgaataccagctcggggtagagcctatacaagtatatatctttgctacctgttttgcactcacttctcctgcaaagagtgggatgtgcaaagacttaacatagtgatcttgcgcgaataatgatgc

SEQ ID NO: 299389 - DNA, 434 bp, Glycine max
  unsure (1)..(434): unsure at all n locations
agctttcacttatccaagcaattcaatttccaaacatcatgaactaccctaaactaggaaaacagagtaaaggtagaaaaatctgcccaaaacacattcacatcttacagctttccttactcaaataccccagtaacattctctttgttccgattcgttaaccgttggatcgacttgaaaattttactggagattcctagtacataagtctacattttgaccgttgggatctgctagaaaatgtccagaatccaatatgtactacctttcccataaccagcaatgcacaagcatttttctgcacatttggtcaagttggctgcacaatttgacagctttttgctgcacaatttggcagatttcgaaattcctcttacccacantccaatttgctcanattggantcctacagtcctaaatcatgcataaatcat

SEQ ID NO: 299390 - DNA, 317 bp, Glycine max
  unsure (1)..(317): unsure at all n locations
gctncttatatggagcacacgagaccagacaaacatgtcacttcatctatcaaagtacatattgatctacatcatgcaaatttatgtgacacttctcatgcctaattgaatgatntgatcgatctatcaacgctctatttatacatacataaaataacaagacgatttaattcctttgacacggttctgtccatgatgtacaacaaggtggttacatacacattatttaaccaattaatgaaaataataatatgtttcatcaaaactgacctgatccttctcatgcttattgagtgagttgattacccggcttgact

SEQ ID NO: 299391 - DNA, 433 bp, Glycine max
  unsure (1)..(433): unsure at all n locations
agcttgtatgtttgcttctatnttctcccagaaaagtataaatataagaaacataaacaagaagctctcttgttttggctggccattttgacatattcgtgcatatttacatagagactaacccattgctaatagtctatattgagacgggtcaatgggggtttatataactatgttaattgctaatagtcaatgcctatcagtatcatcacataatccaatgaccttagacttcattgtataatagtaacacaatcatattaacataataatttacataatatggttgtcattatgaggatcaatctctcagacaanaagtcaaaggaaggcgggacacaaggacagatgcaatntaaacatccaatttgttttatatctttcaatgagaaagagatgatatatcatcactttgacgttcaatgtatgacaa

SEQ ID NO: 299392 - DNA, 439 bp, Glycine max
  unsure (1)..(439): unsure at all n locations
ntaaaggatgttntatcagtacaaaaatatatgtntttgctctggtaattgattaccaaatattgtaatcaattactagagatacattaccagagacaaattacataaaggctttttcaaaaagaagtttctcttttgaaatttgaattttaaatgctgtaatcgattaccacttgtatgtaatcgattacctgtgatgaaatttcagaagttaacattgaaaagtcgtgacctttcaaaacataactatgtaattgattaccaagaagctgtaatcaattaccagtgagagaatttttgaaaaatattctgaaaagtcacgtgtctntcaaaagttttgaaaagccaccaaggacctataaatacgtgacttgtctacgaanaacattagagttnttcattagaacctangtgacatattctctcaaaacaaatcatt

SEQ ID NO: 299393 - DNA, 411 bp, Glycine max
  unsure (1)..(411): unsure at all n locations
gcttcttgtctcanaaatggcctttgcaacataatgccgcattgctcttatggccttcagataatgaggtatgatataactcagaancaaatgaaatgaagatcttctgtcttaattgcttaaaaatttgttacgttgagacttaattaactattctctgtttatgggccatttattttattttgacccttaggataatgcctccgatttcataagggtaggtggaattcagagactgcaggatggagaatttattgttctagtaagttttttctttaatgcacactntaactnttattacagggtttctgctcttacccttggatgcctaaattaaagaaacatctgaacatttgtaatttanagaaccggnggaaaatagattcatctttgacctatattgacccttat

SEQ ID NO: 299394 - DNA, 387 bp, Glycine max
  unsure (1)..(387): unsure at all n locations
ctatagaagtaaacaagatataaatatcctcacattatattttagcatatgtgcataaataacaaataagtcataagtcatcaagacataaagcatttgtctgaggccctggcatctacaagtcctaattctcttctaatggcgtagaaagagcctttggttagtggttctgtgaagatgtctgcaacgctggtaattagtatctacagatgctcaaaacacagtcacctttgtcctcagactaacggctaatngaccatcaacatttaccaagataagtttttattgacatagaagggcttatcatatcaggatactttatttgaaatacatataataattttgaaaagcataaaaatttttatcaggccatcaagtattcgacat

SEQ ID NO: 299395 - DNA, 333 bp, Glycine max
  unsure (1)..(333): unsure at all n locations
tgctgcatttcggaataccattnttcggggaaaacatgatgtttgacagagaaaagaataaatacaatacggcgaaagtaatgttagagacagacaaaaggagttgcaagacatcattattattgtgcataataacaagttttctttttggtgcagtgcataataacaagttagtaataatcactacatgttttctttttcagttgtcgcctttattcatcgaagtatgactctaatcttgagtctttttttttggtataaactaatcttgaatctgaatgggtggttaagtaaatttctaattgaaatgatactttaatctaaaatttaaac

SEQ ID NO: 299396 - DNA, 426 bp, Glycine max
  unsure (1)..(426): unsure at all n locations
agcttaacatgtagatattggaacacatcatcgaaagcatcccacaaggtatgtgttcagttctgtaagttaacgaggttgaagtataacttctcaatggttcttttgaaaaattgcatttgcaggtgcaagaaagataaggactacctatataagcatgaagtntaaccgcttcaagaagctgggacttggctttgatatgcttatgaaggatagggacacaggctagtaaactagtgtccaacaagagtaatgttataaactattgtgcagattatcttcatgtattcattatgaatagaaagggttcaatccttagtgacaccctgatattcgaatatctgaaacgtgtaatttgttaagatgaaattcaatcgtcacgatatttcatctatgcagtaatttgtggtatgttatgactttggt

SEQ ID NO: 299397 - DNA, 212 bp, Glycine max
actgcatgtactgctgctctaatctgactgtatgcattttcccaaaggataatttatgctccaatataatacgaaaataaatgtcttgaaagaattgaaaatgtattatagaggatctcaatccaatgagatactaattgataagcctattttaacctctacctaaaataaaatatacaagatctaatctatatggcttaattcgatataag

SEQ ID NO: 299398 - DNA, 182 bp, Glycine max
  unsure (1)..(182): unsure at all n locations
cacattatttccatgacacatatgcaaagatgatgatttgganatnttatgcanaactggtcatgcatgcacctatgcggacactcaagtgtcaaatttttatggtcatgggatgctacggctcangattcatttcctctattgttagtcaacccaatgtatcaaaatatgttcttttatca

SEQ ID NO: 299399 - DNA, 348 bp, Glycine max
tcaagctagggccagattctcgtgcatgcagaggcttcttctataaaaactccaaactccctttgcaaatctgatttcaggcttaaataggtggccttgttcgtgctcgtgcgcttagcgcagatctagatcacttagcgcgcctaagtggattgtggcttaacgtgcttgtttcgcttagcaaatgagctgaagcggtgcacttgatgacctggagtgtgacaccctctaccccgacatatatataaataaataaaatatataaaaatatattggtaaacaaaatcacatgggtaaaaggttcacattcacttcatttaccaaataaaacttattaaaaacaaattc

SEQ ID NO: 299400 - DNA, 276 bp, Glycine max
  unsure (1)..(276): unsure at all n locations
ttacctccttgagataagaagctagagcttagctacacacaccccactaatagttaagctcacctccatgccaaaatacatgaaaatacaaaaaagtctctactagaaagactactcaaaatgcccttaaatacaaggctaaaaccctatactactagaatggccaaaatacaaggcccagaagaagganaacctattctaatatttacaaagacaagtggacccaaccttgacccatgggctcaaaaatctaccctgaggttcatgagaatccta

SEQ ID NO: 299401 - DNA, 398 bp, Glycine max
ctggatcctggatcctggaaatcaaatttcttcttgaaccttgaagtgttcttaatggaatcttgaactcattctttgattcttgagatcatcatctttggtatcatgaattggtgatgatctttgagtttttttgtatcacctttgtcatcatcaaaacctctttgaatcaatcctgattcaatatgaagctggcttctacaatctcccccattttgatgatgaccactttctaaatcaagaaacacacacacacacacacactcacacactttttctagccgatgactcacataaaattcctttctccccctttggtttttgaatatatgcttggcttaaaattaaagtgattactcatgtgagtccttggattaatccctattctctcccctttg

SEQ ID NO: 299402 - DNA, 303 bp, Glycine max
gcattcgctaagcacgacactcctgtgctaagcgcgaggaagaatccagaagaagatgagctgtacaagttcactaagcgcaccacttcagttcatccactaagcgagaaaggcgcactaagccaaaaatcactaacgtgcgctaagcggtccatacgtgcgctaagtgcacgagcacgaacaaggccacctatttaagcctgaaatcagattttgtgaagggagtttggattgggattcagagctttgcatgtctagggtttctagagagagaaaggtccaagttctagagagttttgagag

SEQ ID NO: 299403 - DNA, 353 bp, Glycine max
agctttcacttacatacgaagatttgtgagtgacaaaccatgttgtcattcttgacaagataaccaagaggcatgtccatgtatactccctcaatcaaatcactattgaaaaacacattatttaaatcaagctgaaacatgttccaatttctgtgaggtgcaatggaaagaaacactctcattgccgtatgcttggcaacaagtgagaaagtgtccaaaaaatcgatctctgcttgtatgttgttgtgtgtaaccttttgcaacaagacgagccttgtatctatcaatggagccatctgctctatacttgaccatataaatccatctgcaactgatgggtctattatcgggtg

SEQ ID NO: 299404 - DNA, 229 bp, Glycine max
  unsure (1)..(229): unsure at all n locations
tgcattatcaacttctcatccctggaatatgcacccatctttcgatagtacattgttaggtgattcttatggcaagtcgtccctttgtacctatcgaaatcaggtaccttgaactttggagggatgacgacgtccggcaccaatcaaaggtcggtcatgtccgcaaatggataatcgctgaatacttcgacagccctcaacctcttttcgatgagatcgagntttccct

SEQ ID NO: 299405 - DNA, 364 bp, Glycine max
  unsure (1)..(364): unsure at all n locations
agcttttcgattcattctatgtacccgtggtggtccacattgtgttttatgtatttctattctcgcttcatttaccttttatacccnctcttgatgtgcttaagccattttacttaagtcatttctcgcttaacctaaaaataaaatacaatttcaccgatcgcttgaattgtattatccgttaacttcngttaaaatgaattccgaccgttcggtcgtgccgtaaccacgttggatatcataaatgaggtcacaaataatataataatcaaaaaacatctctttagtaaataaagcggatatcaatcggacgtttctctttgggattctcattcttattgaatngctaataactaagtgaact

SEQ ID NO: 299406 - DNA, 186 bp, Glycine max
ttagtgaaaacatgattacatatctaggatttttttgcttgaatgttgggaataaggggggttttgtcattggatacagtgtgatggctgcttatgattatttgaccatcttgagtcattgctatggtaaatgtgacatgctgaatatagctgttctaaagctacatgctaaaaatcaaaaaaaaa

SEQ ID NO: 299407 - DNA, 370 bp, Glycine max
gtgtaatcaattatgatcagattgtaaccgatgaaaatagagttttaaacattgaagaaattttctaactttagaacctttcttcttagtcctacatgatgatgcatgatgcacgtatgaaatgatagagactaagatgcaacacacaatacaacagtcaatacaaacgccactcaagagagttgggcatgtaaaagacaaaacttcttcaagttcttctttaagcttcaaggccaagtctttattttgctccccttatctctaacaatcttccccttttttggctttgatgatgccaaacttgaattctccatttgagtgcatttggagagtcttaagagtagagacttttcttagacaaacctgaatg

SEQ ID NO: 299408 - DNA, 402 bp, Glycine max
  unsure (1)..(402): unsure at all n locations
agcttccagtttattttcatattntcagctcctagtttatagcttataagctttcaactaacttattaattagttttaccaaattaaatttgttagtttataagttttacctagtttataaatgaaaaaataaattaagctaaaataaaatgttcgtcttttatgtattttttgtttctactctgctcctctaatttagnctcttataactttcgggaagataatagaaaatggaatcgattgaaacatagtagaatgggtgaatcatgaatagaaagaattaacaatatgtcactctattattaaataatgtagatgtataatataatggtcaaaaattagattccatcatttgataaaaggagttgaataaattatctttttattcattatgaaaaataa

SEQ ID NO: 299409 - DNA, 269 bp, Glycine max
  unsure (1)..(269): unsure at all n locations
cttatttcatgtattcactgttcctctggtacttgattattatatatatttatctttgccgagcaaaaaacaaatgtctatgggcctagagcatggcaatgcaggtgacccanaaatggatctaaaatagactctgaaatcattntagaatttgggcttagtgaaaaggcctaactcatcccatataaccgacttgtagggtgaggattgctcaaactttataagctctatttaagttatatctctagactatgtgggactaaatactc

SEQ ID NO: 299410 - DNA, 417 bp, Glycine max
  unsure (1)..(417): unsure at all n locations
tgctttctcttgccatttcctgtgaaggcaaaaatttggaaagttagttttaccagtgggacactactcttaaaacaagaatggcatacaacctcctcccataaatacaaacatcaatgtaaatttagagcaagcttatgcgcatgtttccttacgaacgttcacttgcggaagacatcctattaactaagaaaaatgcacccatatacaatcaaggtagcttcattacctagattatttacatgtacctccaaggtgtatttgttatttacatcacacacacctccttggctgaatttacatacatgcatactcaaagcattntggggtaccaaaaactgcacatgcgctcatcttggtatntctaaataccctacatatacaaacttcacgatgaatcttgactgcctacacaat

SEQ ID NO: 299411 - DNA, 421 bp, Glycine max
  unsure (1)..(421): unsure at all n locations
agcttcaattctaccactaaatggtgtaataagttcatatctcaactntcatacctctacattcatttttctttctaatcctctatcagatcagcactcctcacatctttcaccttgaattgacaaaacgtgacctatatttctatgtgtgtcttctgaggtatcattccctaattaattttacattntgacaccttttcctctctctctttccaggatgctgctagttaccgtgatgagctaaacaatattgccccacactctcttttaaaatgttgcagcgatgctacaacattggtatgatccctactttcagttaaatacgttttatctccgagtgatgtaagctatctcaagagaaatacagttaacaaggaaaaccaacttccttttttaaacagtcttttaagttgattgcact

SEQ ID NO: 299412 - DNA, 168 bp, Glycine max
agatattccaaactatttgccctaattgaaaatctatttcactttgtactcaagttatgaattaccttaatgacgatcttcttaagtaaatgaaacaatgtggatatgaatataaagcaattatgatataaggagattaagggaagagaaaatgccaactcagtttta

SEQ ID NO: 299413 - DNA, 363 bp, Glycine max
ttgcttgtcattgtgagacatcagaggctagtatttgaataaatgtgggtaagaaaaattcaccaaattgatagagaacaatctaaaatcatacatcttaggcaaataaggcatgctagcccccaacattattgcattttgattccatctttacacattcaaattgttgtttatttctcctgttatcttttcctttgccttagtctaaatttcaaacttacaattccgtatctctttcttcttttgtttctcctcatttcttaataattggatttgcatcacttaagtacaaccaaagtccctctggatttaattgttgaacttcaatttcaatctttactactcgtgataaaattacgacac

SEQ ID NO: 299414 - DNA, 290 bp, Glycine max
  unsure (1)..(290): unsure at all n locations
cgaccttagaatactcagcttctcgctcanaattcacttcttggttggtgtttttggtttgtgctaaaggtggtgttcgtcattggaagtgtggtagacagactttgtggtagatttagggatggcctttgtggataactgggtggtgggtaaggaggaggtttgttattggctgagtaatgacattgttgggttggtgggaaacttggccgtataggaatggcagtcacagcatgggtttctccctctttctcaccctcttcatttgccccagttttctcagtcgtcta

SEQ ID NO: 299415 - DNA, 498 bp, Glycine max
  unsure (1)..(498): unsure at all n locations
agacaacgggggaaatgagcgactcacgncgtncnaanacncngnacccgggatcctgtcagtcacctgcggcatgcaagcttcagtttattttgcatttggctgaaattaatttaagtgttgtattgcgtattccatgatgatacattctgtgtgcgtgctaaatgaattggctcactgcgatggcttatgagatgggttgccttcagaaaatggtgattgcttatattatcttagagattgctgatgagaaatggttgaccccctgataacacgcatatgctgtgatcgctctcgtgtgcttgctatatcgacccatcaccatatctatacatcctatgactgctttatgcactagaactggtcataagactttctgagaatatatatcgttatgcatcgggcgtttacacacgngcccggctttacagaacatcatcccaaaaaactgacatggctctcttgttgaatttccatacttagagtttgactctctcg

SEQ ID NO: 299416 - DNA, 338 bp, Glycine max
  unsure (1)..(338): unsure at all n locations
tagaatactaagctntgatccatgaanacgacaattatctttttctcagatgtcttattgagtccaataatataacgagacgctcgaaattgantgttgaagctctgagctaattcaaacgacaataactgtttactcggatgtctgattgagtcccgccatatatcgagacgctcgaaattgaatggggaaactctgagccaattcacacgacaataacattttatgggatgtgtaattgcgtcccgtatcatatcgagacgctcgaaattgaatggtgaaactttagacaattaaacgacataacttttacttgatctctgangagtcccgaacat

SEQ ID NO: 299417 - DNA, 419 bp, Glycine max
  unsure (1)..(419): unsure at all n locations
tagctttctctgggccatttcctgtgaaggcaaaaatttggaaagttagttttaccagtgggacactactcttaaaacaagaatggcatacaacctcctcccataaatacaaacatcaatgtaaatttagagcaagcttatgcgcatgtttccttacgaacgttcacttgcggaagacatcctattaactaagaaaaatgcacccatatacaatcaaggtagcttcattacctagattatttacatgtacctccaaggtgtatttgttatttacatcacacacacctccttggctgaatttacatacatgcatactcaaagcattntggggtaccaaaaactgcacatgcgctcatcttggtatntctaatacccctacatatacaaacttcacgatgaatcttgactgcctacacaat

SEQ ID NO: 299418 - DNA, 328 bp, Glycine max
ccttgcctcatagaggtccaggatggactttgcagccgaatgatctagttccgctccggagtatgacagtcaccgctttatgagcgctgtacaccagcatcgcttcgaggccatcaagggatggtcgtttctccgggagcgacgcgttcctctcatggacaacgagtatgctgatttcaatacgaaatagggcgccggcggtgggcatcactggatactcccatgcccagtttgacccgaaatagtccttgagtttatgccatgcttggccacaaagatggcgtgctgacatagatcctgcgtagggtcagtgaatctgtttgtgcca

SEQ ID NO: 299419 - DNA, 349 bp, Glycine max
acttgatgattgttactgtttctcaattataagataagcattgtgttatgacttggttctgattatcaatttaagataatgatgactccttcataactctccatacctgaagtggtatgtaaaggtgataatatgtaatttgatagttatttaaggaaaaaatgcctaagtctatactaaaataagttgtcattattaaaatgatgttacaaatccactgattatatttgggggtgaggtcaatggctcaagtatcacattgaccactgcaagattttacttcatgttaatatactttaattctttatctgatgcaatttaatctatctatcgcttatgactacttaaa

SEQ ID NO: 299420 - DNA, 273 bp, Glycine max
  unsure (1)..(273): unsure at all n locations
ntgcggatgtggtcttcgccggtgaattggtcgaagcggatttgaaaagaggaaaatgtaatcatcctgcttggacgaatgagaaaattggggcaaatgaagatggtgagaatgaaagagaaacccatcctgcgactgctgtttctacatgggaactccgccaccagctcaacaatgtcattacatagcaaataacaacccttctccgttactaccacctaattaaccacaaacgccatcccttaatcatccacaaaacccacctgtcacaca

SEQ ID NO: 299421 - DNA, 456 bp, Glycine max
  unsure (1)..(456): unsure at all n locations
agcttgaagttatatgttaaaataactnngtgtattctttttacattctcttgcaacagcctncacttgagnnttatcattanannagtgttcagggaatnntaatccaaacctattaannattgatcccaataanaattgatnaatcgagcanaattgttatanaaaaatacctaaacacttcaatgcnagttcggttttgtgattctcatgttcaaaattgaactgagtcaaattggaaacgtaactaaatttatattagtcttattttgtcttctttntttactgcaattcctatatatttatcttgaaatacaatttaaccttatttgaacttatattattatttctgaataacttgaagataatntgcaatntagtctgtgatttagatcaagttgtggttttatgaccagaattaatagtttgaaatgatatttctgtatatgcattatg

SEQ ID NO: 299422 - DNA, 465 bp, Glycine max
  unsure (1)..(465): unsure at all n locations
ggatgtgattggggacctgagactcaaacntataaaacccngaatggacatccggtgaacctttgaaattngaatttattagagcttccgaggttcaatttcgagtgtcaatatatgtgatgcgccatatatggacattcgagttaaatgttatgaccctttaaatatctcaagagcttacttggtaaatttcgagcctctaacatattatgcgccccagtcggacatacgtgtgaagagctatggccattgaaacatctgcgacagttatcgatgataaatttcgagctgatcggtattataatagccctgaatcggacatccgagtgtaaagatatgaccatttgatattctcaagctctttccgtgatgcatttgtagcctcttagaatataatgcgcccgatatagaatccgtgtgaaaagttatgatttataaagtctcagaagtttcgagtacattccg

SEQ ID NO: 299423 - DNA, 358 bp, Glycine max
agcttgtttgttataaagacccaataattctacctattgttgtcattctatttaccatgcattttatagtttttagcataaaagtttagtttaaattctttttgaaattatcacttatacatgttatctcaacaatgcttcaattctgaacttaattcaggctaacattaacctcccatacttccatgggaaggataatgtagaggcttatttagattggcaaatgaaggttgagcaatgaatgttcctttagctacccttagcttccaagggtatgctctctataggtggacttcacttgttatggaaagaaacattcattgggatcctctaatagagtattggaatgacttgaaaa

SEQ ID NO: 299424 - DNA, 395 bp, Glycine max
  unsure (1)..(395): unsure at all n locations
gagacngagaccaacatgttagctatcatcgccaagtaccaagaagagttaggtctagccacgggccacgagcatagaatcgcggatgagtatgctcaagtatatgcggaaaaagaggctagaggaagggtgatcgactctttacaccaagaggcaaccatatggatggaccggttngctcttaccttgaacgggagtcaagaactatcacgcttgttagccaaggccaaggcgatggcagacacctactccacccncgaagagattcatgggcttctcggctattgcagcatatgataacttaatggccacataatagaaatcgtatggacttgatggctctcaacctcactgatacgactctttttgaataaatgagtggtcatgttctctcg

SEQ ID NO: 299425 - DNA, 207 bp, Glycine max
aaaattgattctcatcaccgaagctgtgcctttatggagaatcctccttcggcttatcgattctatgtggataatggcgacagactgtgcatattcttcatcttatgcatattttctattgttctgcccttgagctctcagaaagtcaacaatggtgggtcttgaatttgcatcctgcatgatacataccaagtgtccatggcttgg

SEQ ID NO: 299426 - DNA, 341 bp, Glycine max
  unsure (1)..(341): unsure at all n locations
agcttgtaattgatgcttaatggaggaaaagaaagagggagacaaagagagatggcgggagcacnaaattgaaggaacaaaagagggagagaagtggaactttgaagtatgtctcacaagactctcattcatcaaagttacaacaagtgttacacatgcttctatgtatagactaggtagcttccttgagaagctntcttaagaaaacttccttgagaagcttctttgagaaaacttgcttgagaagctagagcttagctacacacacccatctaaaaactaagctcacctccttgagaagcttccttgagaagctagagcttagctacacacacccatct

SEQ ID NO: 299427 - DNA, 341 bp, Glycine max
gaataccatttttcggggaaaaaatgaaatcgacagagaaaagaaaaaatacaatacggcgaaggtaattatgcaagcacaactatgggacattctcttgtggtactactctcgtgtgaaatagggatttcacataactgatattgaatttggctcattttttatagacgatctgacatgaactctcatcctttggtgctcctctaatccatcgaagtatgactctaatcttgagtctttctttctggtataaactaatcttgagtctgaatgggtggttaagtaaatttctaattgaaatgatactctaatctaaaatttaaactccaaagggtataact

SEQ ID NO: 299428 - DNA, 343 bp, Glycine max
  unsure (1)..(343): unsure at all n locations
agcttgtatattttcccaattcatggntattttggagtaaattttgtaaataaatcttgttttatggttaacgctgtctctagaagatttccattggatttaatgatgaaatctgtgcattctcaagtgaaaaaaaaggctaagttttgaattgcaaaaagtagcagttgggctaagctcaacagttgggctaagcgcaacttcagcgcgcttagcgcaaaggagaatttggtagagcatcagcatcaaagttgcgcgctaagcgcgagattagtgcgctaagcgtagtaggtgccttcagccaggctaagcgcgaaactggtgctaagctcaattccactta

SEQ ID NO: 299429 - DNA, 208 bp, Glycine max
agcttctatactaccccatttctctcccgctttgggacatcgataagccaaagttcgtggcaaccaacacaagatgatataactaaagtgtacataatcaatcataagtcacaaccagatataagccaatcgtccataagatgaaaccaaatatagtccaagcataaataacgtataaccaagtataatgcaagcgtaaaagactaag

SEQ ID NO: 299430 - DNA, 401 bp, Glycine max
  unsure (1)..(401): unsure at all n locations
catcaagcttgtgttcgcttagactacatcgcatctacaccttttgtaccaggggcaagcgagcttgtnacacgcagagactacatcgtcttctgcaccttttgtcatccagagacggcgagtccgatgacatgcggaggtaccttatggttatccgcaccttttgtcagccagaggcaagcgagcccgttgacacgcagagactaacatcgtcatctgcaccttttgtcaaccaggggcaagcaagcttgttgacacgcagagactaacgttgtcttctgcaccttttgtcatccagagacggcgagtctgatgacatgcgagggtaccttatggttatccgcaccttttgtcatccagagacngcgtgtccgatgacattcngnggtaccatatggtta

SEQ ID NO: 299431 - DNA, 522 bp, Glycine max
  unsure (1)..(522): unsure at all n locations
tgatattatttatctanggcatntcccattttaccttangtggcggaagaaagtcanagagagctgtngacntctcnngattcttattcgcttagacncnnatatcgcatggggggagnggcgttgctatggccctggaataatcgaaaacatagtatgtagtatgttgcctcggtangaaaactaaaccttgtgcccanagatcccgtctctctatacttctcattcaccttatgttatttcatatcgcagaaaacactcttggctttccatacgcgcgtgctttgtgaatgcaaacttgatatgaagttaccgcactactnatcatcttgagcgttatactcaacgaaccacttgtgtgaaactgggatgttataataaggcctagatatcgtggaggtctaagtataacgacaactcgcgaagtcaatgtgggcttacctgcgaaatacatgtgggacatgttacatgagcccaacaaactcagggtctcttttgtttcaactaagaacgaacgtgttg

SEQ ID NO: 299432 - DNA, 319 bp, Glycine max
tcagcaactatggctattgctacgcccactctctctctccatttcgccaaattccccattcgtcaaacggattcatcttctccaatacgccatcgcagcccttctggccgacggttgaatctctattaccctcgtagttctcaaaggttactttttttttgtttgttcttggttaaatgaaattgaaatttcgaatttggattctgagttaaatgttaaccggtggttgtttgatatctccttctgttctattggttacagaattgcgtgttggcactgatgtgcatttggatcattgttgcaccgatggggatgggga

SEQ ID NO: 299433 - DNA, 506 bp, Glycine max
  unsure (1)..(506): unsure at all n locations
aaaaaaacgcggggacggaactgagcanagcactncaanncnctnngaaccgggatcctctgagtcacctgcggcatgcaagctgccattggtatttgatggtgcgatcatccactgagactaggcaaggccggaccctnctatacaaggaggctatggtattcaaagaactgtgtaatttttaaaacccaactaaaatggtttgagccgtcaaatcttggaacatctagtttcattcttggtggataggttaagtgggttcgtggtgcaagtatgactgaagacgactaacgtgaagctgtctgtggtgaagtgtttctatggtggtgacactgtgttaaggtcatcaagtttctcactaacgtggaatctgttagatgccaatatggcgatagctctctctatgcgatcctattggatatggaccgccttnattcacgcatggtgagtctctatttgaagcacactagatggtctgagctgacatcaatgctatattctacgcg

SEQ ID NO: 299434 - DNA, 93 bp, Glycine max
gtttgtgggtagtaatttgactgatatgtattcaaagtgcggggagttgtctgatgcatgtaaagcttttgaggaaatgccttgttaagatgc

SEQ ID NO: 299435 - DNA, 359 bp, Glycine max
  unsure (1)..(359): unsure at all n locations
agctntgatccanaatcctgactcaccatanaccttgacccaaggtgagaatgccaatccttatcctcggaagcaaaaaaagaggagaagaaaatttccaatcaaaggaaaaaggagaagaaaatntccaatcaaagaacaagagaaagaaaatttccaatcaaaggaaaaaaaggaagcaaagaaattcccaatcaaagagtgggagaaagaaaaaaagaaaagaaaggaaattcccaaccaaagaatgggagaaagtaaaaaagaagaaagctcctgatcgaaagaaaacagaagaaatgtgcagagaggtctttggaccggacaatatctgaacaatacagaattgtcaccaaatg

SEQ ID NO: 299436 - DNA, 220 bp, Glycine max
aacgttctcttgcacaagacatttatatcaaagaatgcacccatatacaatcaaggcagcttcgtcatctagattatttacacgtacctccaatgtgtatttgtaacttatatcacacacatctccttggctaaattcacatacatgcatactcaaagcatgtaggggtaccaaaaattgcacatgtgcacctctttgcatatctaatacctatacatac

SEQ ID NO: 299437 - DNA, 386 bp, Glycine max
  unsure (1)..(386): unsure at all n locations
ctcacattcactatcttctacatcatattcaaagttgtctaaataaataataaagtcatctcgactcatagaaaatcatataagtctcatacaattaatatagaacctatatcctaatgtcacatcctatcagagcgtggtgttcccgtgtcctctagcatgaggttcttcatagtcatccacctattcatctgctcccccgaacacaagttcaagatcatcacangatccaaacacaacaacacacagggagtgagttatcacattcctatgctatagagaaacatgacaattatatatacatattatataaatgagataccacttgcttaaacatagctcacgtaacttcaccacttcatcattcaaaattcactcttcaatta

SEQ ID NO: 299438 - DNA, 450 bp, Glycine max
  unsure (1)..(450): unsure at all n locations
atttacaacagtgttacaacagaacctaactgtntctaattatatgggccattaaatctatcatgtgttgacagtaattgattagcccgtgaatttcctctggagctgaacacacttcggccatggcccttgctgtggctagtacatgccggagctcttgacttccatttaaggtcaaggcgaacctatccatccacatggtcacttcttgatgcaatgcatcaatcaccctacctcttgctgtcttctcggcgtatgcttgtgcgaagacctctactagctttttctcatgggtcaaagattggtttaactcttctatgtactgccctaatatagctataacctgctttgcttcttggcttctaagcgtgtagccaaactattcttggatctgagcaaccagtaactcctcctttagacatgccatgacctctgattggtcttttcctc

SEQ ID NO: 299439 - DNA, 430 bp, Glycine max
  unsure (1)..(430): unsure at all n locations
tgaaaccttgtacactggaatccagttagtccctggatctctgagcacctgcggagcaggaattttaactttgacagtccagttcagcgtggcacatttgtatggtgtctgtggcaacgatgctgctcctgagatagcctacttcatactagatgaacctacatagtgtggagcccactgcccccggtggggctttgaacgctgtacactgaatttagcacaatgacccccatcctgaactggagcggtgcacccgctggtttaagaattcatgactccctatgagatatggcgcgctgactattggggacagtcatgacgttggggagattaactgacaaagcgcgctggggacactctgatggtacgcgctaactcagtgggttattacaaaggaccgtgtccttaatgggtccgagcttggtccgcn

SEQ ID NO: 299440 - DNA, 221 bp, Glycine max
actggccaggcccaaacacacatgcaagacaaagtgagcgaaaccgagcagcgcgcagagaaaaaacgcagactgacagctgaaccagtacctgacgcagaacaacacgaaatggaaaccccagcggagacacgcacgggcggcccaccccccgagacagaacagggcgacacaggcccccacaacgagaggcaaccacgacccagaaccggacacgcgac

SEQ ID NO: 299441 - DNA, 299 bp, Glycine max
  unsure (1)..(299): unsure at all n locations
agctngcattatatcttatccgagattcattatcagatgaactatccaagatagcatcaacatacttcttaaaaaggtgctctccaaggattttccatcttttggcttcaatttaacatgagccctaccctgaaaagcttcaacaagtacctaccttgttctaaagagagttatcttaagaaatctaacatactcttgggatggaggtggngcgctctatacttccatggccacattagcaacaacaacacgtgcctcatcatcaaaattcacctcttcaatgatggattgtacaggat

SEQ ID NO: 299442 - DNA, 247 bp, Glycine max
tctatccttcctaagatggagcctttcccactcactctcattaagaactaacggtgtcaatggattgaacccatacacaacctcaaaacgtgactgcttggaggttctatgaaccaccctgttgtatgccaattctacatgacgaacatactcatcccaagacttatggatgcctttcacaagagcccttcatacggtggataacgacctattcactacctatggttgcccatcaatttgtggatga

SEQ ID NO: 299443 - DNA, 357 bp, Glycine max
  unsure (1)..(357): unsure at all n locations
agcttctctcntttcttgtttaattattatattctgtttgtaagccttgtattttgctatgtttttatgacatttgaacacttagtatttcttttaaatatttgtttagtatgactaaacatgatgattacttgctcttggttgattatggttatgagttttaaacttaattattttgatgatatatgattagtggtatgtacttttatttggttattatgaatgactctctggattatatgacattctatgaagtattatctttctaagatngatgaatgtgtaagttatcttggttgatagatctctattctcttgtatgattagaaatttatgtatgtttatatatgtacgcac

SEQ ID NO: 299444 - DNA, 203 bp, Glycine max
aaagaatgtgactcttccaattgaatatgcatatctatgttcacacacactattgatcgactaccaaacagatgtaattgattacatcatttcgatattatttggaacgttgcacattcagtttgtaagcttttcgaaaaccatttagctattggtaattgattacaataatctggtaatcgattactagacagtaaatactc

SEQ ID NO: 299445 - DNA, 399 bp, Glycine max
  unsure (1)..(399): unsure at all n locations
tttctacatttttcaagaccgacggccngctttgttttagcggacacaatcagacagccgagngagaagtgatcgccgagcgaacngactccgacactaaacagtcaatatcgagcgtcctgatataatccgggactcactcagacatgcgattaataaagtcgttgtcgtttgaatgtgctgagatcattaaactttcattttgaacgtcttcatatattaccgcactcaatatgacatccgagtcataagttattgtcgtttcggtctgtaccgaacctctgcatactgtttcaaacatctcgaattttacgaaactttttatacatgtgagaaacagtttttaccagtcgtatctgcttgcaactcttctatttttaatcgcggttatatatcacn

SEQ ID NO: 299446 - DNA, 496 bp, Glycine max
  unsure (1)..(496): unsure at all n locations
tgaaaccctgttgancccctgaaanacttgataccatggtgacacccgcaccatanagtcacaataccggcacnagctctttttcccggttatttgattccggccgcaagtttttgttgtatgctgagggcgacacgccaccgggcgagctacttgatggtatagatcacacacccaggtcctgtgcatgtgctataagataccgcactactcaatctagcttaatagatgagagcaaccatggatcaaaaggttcttttcgaagcgagggatcagatactagtcgactggtgacgcctagccaagttttatgcacaaacttaggacacttgctcaggtggatacgctcggtctctcacgtgcgggattatcaatgaaaaatgaatgtctccattgtcgctagtatatattgaccgctgaaatgatcgggcgataatatttggccgtactatagaaggaaatagaagtgtcatataaacgctcaactaggcctccc

SEQ ID NO: 299447 - DNA, 453 bp, Glycine max
  unsure (1)..(453): unsure at all n locations
tgaaaccttgaacactgaaaacnggtgattcactggacacgggagacttagagcgactgcggcaagctttctaattcgtcggcagcaacagtgtttctcatcgctctacatgacatagatatctacgctgcaaacaaatggtactaatacatcatctactcttatatcaacacaacgctattgggctatgcatcacatctctctgcggagctctgcgttggcatgctagctcattaaaatgggagcgtacaagcctgacaccatgctagagaagtctggatagcgacgtagttctttagctcttgtaccacatcgtgagctgatgacatggcaccattggctgagagacgcccgatactaacatattgaacttcgctgtactatattacatgagtgtatatcaagaccaaggcacggctctactgacggatagagagcccagacactgactgc

SEQ ID NO: 299448 - DNA, 348 bp, Glycine max
cgccaaccctggcacttgcggcaactacgccgcccagaggctaactgtgaccttaacacgctgggacccgcgacagagcagcagttgctcagtatcacaccggccactgccggcaacgtcaaacagatgacactagaccccccggcgaccgacatacagcgggcggcggtcaggaaggaaaagcgcccaatatgctgcaaccgaacacccaactcaatccgaaaaaggggaagaacccaaaaccgcaagccgacgaaatacccgaatcgccccgatgcgaaaacgatcagccaacgcgcacccgaacgtcatgatacacgcagacccctcgcacacaaagtcaccaac

SEQ ID NO: 299449 - DNA, 376 bp, Glycine max
  unsure (1)..(376): unsure at all n locations
tgtagattgttagtggtgatgaggaaaaagtccctcagcatcgaaggctagctacatcgacacgtagacaacaaacaactatagatgttgcaaaggatgttgagaatgtggataatgttgctgatgagcctcatgaggagcctcacaatctagttacaaaggatgtaggtggtgattcacagggttttccaggcgggtcccaagatacatcaatgttgatgtcatatgttgatcatgtggtagccaaagtgtggataggagaggtagttatttgtttaattaaaacttatttaaataactatttatcattntaatttacatanaataaatttaattatttttaaaacaatactgagttgaagttggcctctcatgg

SEQ ID NO: 299450 - DNA, 444 bp, Glycine max
  unsure (1)..(444): unsure at all n locations
ntatgagaatccgcattcaaaagcaccatgaatattcaattatatgattnttaattattaattaataatataattaattaactttntaaacattatttttaattttttttttcacaaactaaaagagagataaaagataatagaaggctctgagatgaaagaaacatatacttttaattgtggagtaattttgaaaaaaaaattgattattctattacttttaattgtttgataccatttgtcattaagatatccttcaataggaactttcttatttccaaccattgagagattaccctcgttggccaatgagaagaaaggcaaaatcaaagtntgtttttggttttaataccccgtctagatatggagacgagaaaaaggtaaaatgattaaaatcacgtcgaaatacaattataattacaaatctgttgtctagcacaatct

SEQ ID NO: 299451 - DNA, 379 bp, Glycine max
  unsure (1)..(379): unsure at all n locations
agctggtatgataatggggtacccatcacatgtggtactangtggcggtcgggcgatggtgcacaacaagtttttcacatccacaatgcacgcataaacccaccatcccctgttgcccacctccaactgagctcgcgtactcccacgtagcccatatcctcgtttctctcaacaccgggtccccatcaatcctcccaagcttccacaacatccgagcaaaacaacattcagacagcacaagctatcacagccaagcaaaacagagcaaaggcagaatactctgctcaacacatcaaccaaaatcacatgctttctcacttaaagaccacaggtacaattcctcctatccaattcgttaaccgttggatcgactccaaat

SEQ ID NO: 299452 - DNA, 158 bp, Glycine max
actcacttacactgttgttccttttttctgtgtgtttataatgatattaatttagctgctattttttgagggaacacaccactattttttgtttgattcactcacccaatatgggtaattgatatatggattgttatttggaactggaatctttggat

SEQ ID NO: 299453 - DNA, 373 bp, Glycine max
  unsure (1)..(373): unsure at all n locations
agcttgtgattgcatttgggcgtctatttcgactttcctatgctgtctctacatacataaaacagccccaccatcccaattttgcaaaatcatatatcattggggcatttcaccgagcacttgatgggcgcatgtttggacataaattgcaagagaatgggggcaatgtggcatgccccattgcttcagaatacaacatangcctaaggccttctcattcaaatactcaactccacaaaacaagcatggattcagatgcaaattgcttcacgaattntacaaaaaatgagcaactatagcaccaaaacacatcaatggagagccaaataaccaagggaaattgcacttacttgtggggagtgatttatagcgt

SEQ ID NO: 299454 - DNA, 1072 bp, Glycine max
  unsure (1)..(1072): unsure at all n locations
agctcggccggaggcgggcgnacntcnagnactcgggacccgtgctcgtntgcgantagtcaaataataganacccacgtcgncgntcntacnacnnctccncnnccccccccaaggatgatgcagcagcgttttgcancnnactagttngngttgtagaaaactccntactctgcgangancatacgtcantancnncgcntgtantcgacancagatcgacgtctacgatngacgatancgacaacatcagcntattacggagcgaccagaccgatctgtactngtgcgtcgcattttgantcgacatctgcantgaactaagccacggtcctgngtgacatccatccatgtancgtatatgtacgtactaagntacacatactaatgtccgnctgcgttgataactacganancgtgcgttgtactgcatcagactcatacgagcgtcgacntcatctatctgtcctgtgngananatcgtacactgctcgatatgctgctanagtcagtcgatagctgcagtgattacgcgtcgaatgtactgtgngaccngacgagtatgcatgcgngcatgacgcacacatactccctccgtcgctctgntgcntcantnaagcgtacgcgatgagatcagctangacgcantcatcacgcgaatcatagtcgcgcatgcagatcgagcatacgtcgataagtctcgacacggctgcgacntatcgtgcactacatcgtctatgactgaagtcggtgtaatcgatgactcatgatatcgcantnancatatagatgatcggacacacagntctacgagtatgtgtatcgtgtcaacatgcgtatgaacaagtgtcaacatgcacnagacgtacgtctccgntgcgatgaatatggatgactagcctacgtctacgctcactactgtanagtcgtcagccgacactgctatactctnatagtgcgaagagtatcgcatacacgaacgagtatangcgctgcacgcacncgatccgantgngtctacngngctcctaacgtgatacgcataccgcagactctggcgcacacgtactcg

SEQ ID NO: 299455 - DNA, 391 bp, Glycine max
  unsure (1)..(391): unsure at all n locations
agctntaatataatttttttcaaattattagngtatgtatttatcgaataatatataacctttatatgttgggggttaaaagatgtttcagattccatgctatcttcttttcagttgcagctttatgccaaatcaagtcactacttgaataaaaccaatgggatgctgagcttcactagcgaattgataggtaaagaatatagaatgtgatactaagtaaaaggtattcaaacaaaaggataaagaggaacggcacatagtgggcattttcctaaataaagtataaaagcatatgttctgaatgttntccctcataaaatattattgaccattgcatttcacaatntgttaatacctctgcttcctctccattttctgatcactnttctac

SEQ ID NO: 299456 - DNA, 505 bp, Glycine max
  unsure (1)..(505): unsure at all n locations
gatgccccacatagaacnccnatgcgtgnagggtcantctatagaacctgcaagctctgatggtgtcgacaagacatcacatgtntgtcatcatcaaaaatgtggagaatgtgaatgtctcccnncncccttttcttctattcgtacatataatactacaatgctgcctcacctgattatcactttgcttccaatactattttatactgctccacccaacaatcctctgtactcacattcgctcaaatccatccttgacattcgcaaccctctttctctctgacccagtttccgctttgatctcctacaatctaatcttctactcactcgctatgtcaccgtcgcgcatttccggcctctgcaccctgcgcaaccctcctcgctcccgtcttccgatctcgtccggaataaagcccgatcccataacctcccctatacttatccagtcccaatctcgctatccttgccgtaccacctcacctatcgtctctccctgtcaccctcc

SEQ ID NO: 299457 - DNA, 359 bp, Glycine max
  unsure (1)..(359): unsure at all n locations
agctntgattcaaaattctgactcaccataaaccttgacccaaggtgagaatgccaatccttatcctcggaagcaaaaaaagaggagaagaanatttccaatcaaaggaaaaaggagaagaaaatttccaatcaaagaacaagagaaagaaaatttccaatcaaaggaaaaaaaggaagcaaagaaattcccaatcaaagagtgggagaaagaaaaaaagaaaagaaaggaaattcccaaccaaagaatgggagaaagtaaaaaagaagaaagctcctgatcgaaagaaaacagaagaaatgtgcagagaggtctttggaccggacaatatctgaacaatacagaattgtcaccaaatg

SEQ ID NO: 299458 - DNA, 466 bp, Glycine max
  unsure (1)..(466): unsure at all n locations
gcttatgcgcatatttccttacaaacgttctcttgcacaagacatttattcgaanaaatgcacccatatacaatcaaggcagcttcgtcatctagattatttacacgtacctccaaggtgtatttgttacttatatcacacacatctccttggctaaattcacatacatgcatactcaaagcattttggggtaccaaaaattgcacatgtgcacctcttggcatttctaatacctatacatacgcaaactttatgatgaatcttgactatccacacaataaggtgctacatttcatgcctctttttcaagtttttgctacctanagccgcatgcanaatcaagcatattttcctttgctgactaaaattgtattcaaattaaaaggtatantttttgtaatatgttntcttcacataacatngcacatatntatatatantttttttttgtgagaacatttgacta

SEQ ID NO: 299459 - DNA, 399 bp, Glycine max
  unsure (1)..(399): unsure at all n locations
agctgacttacactctgagcatanaagtgtgtnttcttttntagaatgtatatangtgtatggcaattagaatatattaaatgttcttgtatgttgacatgggtaataggatactttctacacatgcgcgtgtgcataaatggattacatgagtttggtctaaatcagaagggctagcacgacatttttgcgttaatataagcattatcttgtaaaactaacttctanatgtttgttctcgcaggaaatggccccgaggaaacttgcctcanagagatccangaaggataaagcggccgaaggaactagttctgctcccgagtatgatagtcaccgctttaggagcgctgaacaccagcagcgcttcagggccatcagggatggtcatttctccgggag

SEQ ID NO: 299460 - DNA, 408 bp, Glycine max
  unsure (1)..(408): unsure at all n locations
ntacatctcaggctaagcgcatattcctgaaatctttgtgttgcatatagtgctaagttccacctactgcgctaagcccggatgctcattggaatttgaaacttcaaattgggcttagcgtgaggttaggctaagtgcatgggctttaaactcaaatgtcatattggcatgctaagtgcgccaaacaaaaatgctaaaatgaattagaacttccataggtggttacctttacacaaaacttttgcttcttttgctgagctctccttctgtgtgtgagcattatgctgttgtgcctcaagtactttctacatcttcttgcatttaattcccatccaagtaagtagtgcttcatttccattntcatactgtgaaacttaggatagacgatgtcttgctttgttagcttgc

SEQ ID NO: 299461 - DNA, 313 bp, Glycine max
  unsure (1)..(313): unsure at all n locations
agcttgaatatctntgatctaccaaagaaactaatgagaagaataaagatttcttgtactcatctgctacagacataatgtaagagctanaagggccctctcaagaagtgcagacaccttgagtttgctcaaaaagagtctatgaattgcttatctacatggatcgatgcctnttatggaattgaacagagtcattttattcgatatgctaaattcttcattggtgtagaatcttaaacaatgcttttctatttttttttgattgttaacaattcacgtaatctctttttgaacaaattgcaccctaatttct

SEQ ID NO: 299462 - DNA, 489 bp, Glycine max
  unsure (1)..(489): unsure at all n locations
ggcacaccttacggataanatacctattgtgntaaatccacatagttatatcaagtatctaaatctgacccattaagcccatgaacctaggtggctttgcgaataacaaacttctctttattaagatccatatatttgtattgagttttagggtctgacccgtgaacttagtaaactttatccatgaactcgtgaagtatccatngaatccgcctaatatgtgtaagtatttataatttggtatgttaaagttatggtcaatntacattgtgattgctaatttgtagtgtataaaatattaatatgatttagtgtgatagatcttagcttagaaaatgatttcatttgtttcttcaaattttatatatattcactttttttttaaaaataacttataataaatactttgttttcaatatatcatgtgtcagggcggtccatgtatttgcgggctttacgaatcagatatgaattcttagaaaaagtcta

SEQ ID NO: 299463 - DNA, 362 bp, Glycine max
  unsure (1)..(362): unsure at all n locations
agcttgngtattaatcctaaccttgcatgtgggcttttttccacttacgggagccgccgatgggcccgttgctactgcctctgagttctttgtccttctgttgcaccatctcccacgccttgtggaccttctgaagtgcctccacgttggtcttattgaagcctcgtgcaatatcaggtgtgagcttttactctagtggtgctcctctcatagggtagccaagctgtcttatagcaagaacgggattgtaactgatgcaaccccttgtccccatcaagggaacatatggaaatcttccgcacgaaataaaagtcctggttcttccttctttcatcgagggaaccagtcacagacactccttc

SEQ ID NO: 299464 - DNA, 174 bp, Glycine max
  unsure (1)..(174): unsure at all n locations
attactacactcgattaacacgtcttacctatcnatgttccaatcataatgtttctcgttgcatccaacgttcgtctgtaacagtcaacgtttaaattcgggcttggcgatctaacttatgggattggacataaatggacaactaaatctgtgaattacattaacagggactta

SEQ ID NO: 299465 - DNA, 364 bp, Glycine max
  unsure (1)..(364): unsure at all n locations
tatctntgatttcccgaaaactcacctcgttttatctgtgcattccaaattctcaaaagagtcagtcttgtggcatatcanattgcattacctccgtgtctttctaacctccacaatgtctttcacatgtctcatctccataaatatatccatgatccatctcacatggtcgaattagatgaagttcaagtgaaggagaacttgacatatgaaacatttgctttgaggatcgaggataggcagacaaagcacttaagaacgaaagagattttattggtcaaggcagtctggggaggtgctttacgataggaggcaatttgggaactagagattcaaatgcgagaagcctatcctgtcttgtctg

SEQ ID NO: 299466 - DNA, 302 bp, Glycine max
  unsure (1)..(302): unsure at all n locations
gccctgaactgtgacctganctcaccctagaacgcgaaggggntcaaaaattgttaaatttcgacccggaggatcgtaaatcaacgcggccctgtggcaatatgaatctctggggcgtagactgatttatacgttgagaggaccgatgaatctgacttagcagtaaccttattgttgcctctagttgaaaatgcaagtgttgatggacttatcatcgtggttgacgttctcttaaaaaatctgataagcgagagagtttaatgcttggcttgagctcagcgagttagtgtgcgtgggaaacg

SEQ ID NO: 299467 - DNA, 360 bp, Glycine max
  unsure (1)..(360): unsure at all n locations
tgcttgagtgtgtagatgatgcaagtgactgagacaaagaggatgagaaagacaagaagttctggtaatgttgggtgctatggtgcaatgggagtggcagttgtggagaggtgtggcgacagagatctcacgtgacattttgggaaccctagaggtaagaatagagaaaaacatttnataaccaagaatttaaagcgccagagaatataaagtgggagctacatattgaacaaagagaagaacattctaagacggtttttacaaaaccgtcttggaatgacagtcttctaaaacgatgttcacaaaactgtctctgttgaanaatccatatntacaaagatgtcactgtcttatatacta

SEQ ID NO: 299468 - DNA, 187 bp, Glycine max
cctacttacttatactaacccaatcgcagcattaagccccagttgttctgaaatgaagaggcactccccgtatatagtaagtaccatcccggtttcacctttctagctgccgttctcttacactttacagctacgaaatcaccttcaatctactaaattataccattttctataccattagtcgtca

SEQ ID NO: 299469 - DNA, 315 bp, Glycine max
  unsure (1)..(315): unsure at all n locations
tgcttggttattatgtaatatgaatttcgacatactatgaaagaaggttctgaattctgatgatacccataatcttgttaggtgcccgtcactgtcagaatatatatccttatggtgcattaagttaatctttcattatttcaacttcaatgttaacagtgttattatcacgatgagaaggtgcgattatntcgatatcctgatcgtttctttagtttaagatatattttttgttgatatacacttaatttggttcanaacaagttatttataatataacaattatataaaaaaactaactgatagattatcatt

SEQ ID NO: 299470 - DNA, 368 bp, Glycine max
  unsure (1)..(368): unsure at all n locations
tatagattatctagttgccactcatgcaaccatttctgtgtcacttgcacacaaagagaangtagtctttattctttggtgtatccttctattatccttgctaattgttatgggaatctctttctacctaggcaactatgtgctgatcacaatatacatattattgtaatgctcttaacgtattatcaatcccagcaatggaacaaagctcaagcgtgctgtaaaatggtggtcatcaagatatgggacaacttcaagacgttctgtgaaaggaatatctctcctttaactgctggaatgtgacatgtgattaagcaaagaactacagtctgtgtctatgaggtaaaaatcagtcttgcctcctttga

SEQ ID NO: 299471 - DNA, 767 bp, Glycine max
  unsure (1)..(767): unsure at all n locations
tctctaccctgcactctactatccgcgcgtacancgcagtancnnntctactcantgtcanttttacctccccacccccncccnccaacgagagcgcgcagttggagaacanctagntagagcactcctctacgtactgtgcanactganacatatgatcgtcaaacanctgntgtagggactatctncagctaatgacgtgatatctncaatcatatgtgtatcatcacatctgtcgnactatatacgcctgtaaatgtctgccgatcagcanggtactgagtattacttatctcagtctagcaanactcgcgacgcgctcagatacgacacaaaccgcatcaatacagttgagactaccgtcgtcagtcgacntaatcattatcgtgctgacattcgtctgcgacgtaaaaactcactcacggataggcgcacgcacgaagtgcaactcaaggatcgaacagaatgccaaccagatatctcgatacacgacatgcatgtactcgccgcaaactaactgacgagacgaagatcgtataccagatctgatgaagctgcgacggcgaaactccattgaccagactcgcnactacaggcgggcgataatcggtcgcgggaccattctgtagggcgcaacaacaacgacgatgcgtnttctcactgagtgcgagaagacanacaaatcgtacatacgtgagggcgaactacgtccgtcgacgagtacatccgcatggagcttaatcacctcgcctagaactaatccatcg

SEQ ID NO: 299472 - DNA, 302 bp, Glycine max
  unsure (1)..(302): unsure at all n locations
ctgctttttgtcttgcgagttgattntagccttattttcaccttacttattagtcaattcaattaagaatgagaaatcccatagagaaaaatgtccgattgattttccgctctattttactaaaagatgatttttttattattatattatcttatacctctttttgattaccaatgtgattacttgacgaccgaacggtcgtaatttattttaaccgaagttaacggataatacaattcaactttcggtggatatttttttattnttaagtcaagcgagaaatgacttaagctaaatggctt

SEQ ID NO: 299473 - DNA, 376 bp, Glycine max
  unsure (1)..(376): unsure at all n locations
gttgcattggaattgcgaaagccccactccatctttaggatntgtttctgccatctcanacaaacaaatcagacgtaacaagacaattatagttgctgtttgaatacctcactcactcaagtgtatcacacaattatggtttttctctaatgaaacactcttgccttttaccactctaattccccttgagttcttatgcaattcaagagattatggccacaacagagaacaattcaccaatatgtgtaaggtaaggctagagaaacancgaaaaggttaaccaagaaaaaggctaacaatgtttttaggcacaaatgaacgaaacaaatttcagactttatgaattcaagtaacaatccttcatgcaaccaatata

SEQ ID NO: 299474 - DNA, 388 bp, Glycine max
  unsure (1)..(388): unsure at all n locations
agcttgcttattaaattgatttggatccatatgacanagaacaaataanacaagatttanaattganattggagaatgcaagattgacaatgggaatgagaatgtgaaaattatgtgcaaattgcttcctatgtgaccaatttataggacccaattntaaaaaagtttaatgtaaaaaaaatataaaaaattaaaacataacatgcatccaaaattcacagagcaattgtcaattgtatgcaacgttctaaaattcatagagtaacggtcaattgtggcaaattgtctttcttttctgcattctttctctttnttctttctttctttctcttcttcccccttccaaaacccacctcctattgccctattttctcttctcttctttctt

SEQ ID NO: 299475 - DNA, 439 bp, Glycine max
  unsure (1)..(439): unsure at all n locations
ntanagcacaacatcacagaatctaggtgtccaacacccctcaattaatgggttntctaagtttgtgaagtgaaattgagaatgaggtaaatttggagcaaactctcacctcacacaagtctataacatcaatctaaacttgctcaaactggatntacacctaaaattccaccgaatcaaaatttgactcctcaacacccaattttgccctagaaatggctcttggttcactttggtcatttgtttttccctctagcacagcctaacctttctcataagtcctaaatggcatttcaagctaagattaattcactctaacctctacatactaccaattccagaattggccttccagcccctcaaaatcactctntntcactcataacaccacatnttactttctaagcctaggttattctacattcctcttacagtttcc

SEQ ID NO: 299476 - DNA, 382 bp, Glycine max
  unsure (1)..(382): unsure at all n locations
agcttgttatgtatatgttacaatgttcttaaatntctaaaaagtttttaagaacaacctgtctaggtaaatcttttcagaaagacttctaacacaataagaaaagaacagtttttcataattaccttatacaccagctaatgatagaagctctttcatattagtttttttcaaaagatatttgtaaattatgtataaactaacattaacttatagaacagtttatctaatttttttctttttattctctttttttagtagtacttctaaatacatttatccaaatagacccttaatattaatatatatcaacaatacttacatccaaattattacttagtcaaggcttgaaattatttatataaaataaccagattaatta

SEQ ID NO: 299477 - DNA, 645 bp, Glycine max
  unsure (1)..(645): unsure at all n locations
aggatacgcaggtgatgcggacacngctgcgtcgtcgctgtacacatctcgggcgggangantcgtgccccactcagcatgagagatgttggangccatgggaacagccgccatgtgcacgatatcactcagcggtattacgcaacgcgccgatacaaacatcgacacgacgngtctgtacggtcgtgtgtctcagcgcaaggcggttggatatgtggacgtgtccatcacttatcaagagtgatctctctgtcggtgcagaactatcagtgtcaggtaataacacgagcagagtacatacttggcgtgaactagtactggacggtaatacagcgggcgagacgattgtgcagtgtctatggccgcggactcacatgtccgcacgaaaacggatgcgacggttcgagtcgcgcgcatgctcctgagcatcagatcagcccacagcatcactggcatacatcgcgtggaggctatcgcgcgacgcttgacaatgtcgagcgctcacacgcgaggtccgaacaagtacgactaccgcgcgctctctcaacagcgctccacggacgcaccgagcagaaatcgttcgcgagagatcggccggctgaagttagtcggcggactatctcgtggccattcacgaatggaacg

SEQ ID NO: 299478 - DNA, 311 bp, Glycine max
  unsure (1)..(311): unsure at all n locations
agctntggttctcttcttcttcttctttgggaacggtttctttctgtgtgtcttcgtgcgtttccgccatcaccactcgggaaccgtcggggcttggaaggggttaatgcgtcggtggcggaaatatgaatgcggcgtcgtttaaggtagttcgagtttggcgcacctgcagtgtgtgaatgtacatgaactgcttggctttttgtttacgtcttcggagcagagaaacaactccaaaagtcatcgatatcgggcataggtggtgcaacgtgtgacccggcccaaattgttgtgccgcaacacctgcgttg

SEQ ID NO: 299479 - DNA, 377 bp, Glycine max
  unsure (1)..(377): unsure at all n locations
taatgaaatanaatagaacagaagtcataaaaacaaacatccatgatctcattaatctctctnccccatgaaatcctcacataaatatcattctgtacatctcacttacaaaggttgtgtcggagaataataaaactaagatcaaacccataaggcatcactaattacatgtgttggaacaatagagttctcacacgcactcactgtcactctatgtgagagaataacagaagatgatgaccaaattgattgagagaaaatagaggggacttaaaatttgaaaaaaaacttctgcattctcatgcacactcttgcacactcttcgtttcattgatgatcattagtatttttatccacactgcatatgtagctattat

SEQ ID NO: 299480 - DNA, 388 bp, Glycine max
  unsure (1)..(388): unsure at all n locations
cggaaggatcanagcgggtctgannagaggcaaatttaatcatcccacttggacgaatgagaaaactggggcaaatggagagggtgagaataagggagaagcccatgttatgactgccattcctgtacggccaagtttcccatcaacccaacaatgtcattactcaaccaataacaaaccttctccttacctactgccattntatccacaaaggccatccctaaaatcaaccacaaagcctacctaccgcacttccaatgacaaacaccacctttagcacaaaccaaaaacaccaaccaagaagtgaattttgcagcgagaaagcctgtagaattcaccccaattccagtgtcctatgctgacttgctcccacatctacttgataatt

SEQ ID NO: 299481 - DNA, 442 bp, Glycine max
  unsure (1)..(442): unsure at all n locations
aatactcagcttgtcaggaagctacctaagctataaatagaagcatgtgtaccactttttgtaacttttatgaatgagaaacttgtgagatacacttcaaagttccacttctctccctttcttccttcaattttccatgccactttctccctctctcattctcattctcttagaggtgaagcttctccttccattgcttattctctagtggatgacacatcctctctcctcttctcctttatcttccgctgaaactccatgcgtgaaaatcactattgaaggaccttattgaagctcaaagatccagcttccatagaagcttctcaagagagcttncatgaagtggtatcagatgacaagagtttcaagtaggtgctccttaaacctccatttaatttcaactttaccttctcctacattggtggttcttcattatctccat

SEQ ID NO: 299482 - DNA, 360 bp, Glycine max
  unsure (1)..(360): unsure at all n locations
agctnttctatgaatcctcttacatgagaagaanataatgaaatgagnttttttttttaaactaaaattaattctccattaactaaatattaattaatttatagatatcatatcatctatgagagaaattatactaaagaggctcttatcctcttttgggggggttatttgctctatctagctcttgttctctatatctttgcaaataccttctcaatggctctgcatagtcgtcaaaaccaagcgaccccaaggcccagcatatgtcatccccgttcactgtcttactcctttccttcctgcacttctccgacgcctcgctggttacaaagcttatgaactccgacacgcactcttgca

SEQ ID NO: 299483 - DNA, 394 bp, Glycine max
  unsure (1)..(394): unsure at all n locations
tgttgtcaagacaagacaattgtgttcagagttggaaaactacatgttgttggaagtatgaanatgaataattactttcttttacttcctttattatttctgtcacttgattccataattatgcatgttaattgatagggacttgggtattaaagggtgcccaagtcccacatagagtagtatttaagtgcttggttctccccccttaacaactagcttttaaaggtgggttcaccaagtgcttgggtgcttacattaataatcctttcaccttttactccctccattccaaattgattgatgtttaggcattaaataatccaatatattactattctttcaagtatcaaatccaatgagatataaaacatctatcctttatgcctctataata

SEQ ID NO: 299484 - DNA, 394 bp, Glycine max
  unsure (1)..(394): unsure at all n locations
agcttcctgttaaatacaaaacanacaaattagacaaattattatgaaaaaatngacgtaaatgacatanattattagtaacacttaccactgcatgtctcaactcgtcaacatcagaccttacagatgttaatggtactgctggctcccggacctgagggatatctgtctctgggacctgagggaacaactctggatgcgtagcataaccatctggcanaggatctgatggctggtccgatgtcatgaatggatgcgaaatgcggaagaactagtccatgtagtcgttggcacactgnacctgcacaacgcacatctcacctgctgcaatcatatggtccgaatagtgcatcccacctgtgtgtatatcatcanacgacacccatgaatcgat

SEQ ID NO: 299485 - DNA, 416 bp, Glycine max
  unsure (1)..(416): unsure at all n locations
cagcttgcataactagagccatcaaccaactccagtgacaagaccatcgttaatttaattcatcatgataaacattatacaaaagccattcttgtggttgctactagtttgtttcactacatgcatgtattttgtattgttttaacacttatgttagattgtttcattatttgtttattctgaagttggatttatattgccattcattgagaatatatattttattttaaaaaataaatggtacaaaatgattgacaactgatacaaaatagaaatacatttctttgtgcttttgtgatcaacaaanacatgtttccatgtaaaggcatttttgtaaaaaatacctanagcataacggtatactcggcaaagagaggaggtgtttcaacaattntgtgtcttggtttttctttttt

SEQ ID NO: 299486 - DNA, 364 bp, Glycine max
agcttcatttaatccatgccgacatctgtggtcccattttgcctccctcacacagcaacaaaaggtacgttctaagctttattgatgattattcacgtaaagcttggatctactttttgcatgaaaaatctgaaacaaatactgtgtacaaaagcttcaaagcctgtgttgaaaaggaagctggtatctaaattgtttgtctaagataagatagaggtggtgaattcacctctaaagagtgtacagaattatgcactaatcaatgtatctctaggcaattgacgggtgcctacaccccacaacagaaaggagtcgccgaacgcacacaccgaactatcatgaatgttgtacgagctgtattaca

SEQ ID NO: 299487 - DNA, 475 bp, Glycine max
  unsure (1)..(475): unsure at all n locations
tgaacgtgatgacccntgcaaactgaaccataacgccgccgggtgaaatcaaacctgtagagatttgacaaagctgtatgcaacgggaacaattttgttcctaatgaaatctctctaaccaagcccaagatagaggcctatctaagattctactcatgaatcacagcgctgatgctgacaagattatttggcatgaggttgtctatctctaaactggtggggatcagtgcactatactctcacttcaaataatgactgattgtccatcgactgcggagaccttattgaaccacctgagattgcgacatgctggattgacccggaagagtcaatgcggtcccagattattcttgctatgtattcactactctatgagatgcgccccttgtcaaaaattggtaaaccctattagagggaacaaccgagaacctctctgtgaacgagaatacatttcttaagggccggaagggtttct

SEQ ID NO: 299488 - DNA, 395 bp, Glycine max
  unsure (1)..(395): unsure at all n locations
tgctntatatgattatgatcatgtaacaaatcaaagaaaccaaccttgatgcatgcatttttgttctgaaacgaaactaaagaaacaaaggaaagggagaaaatagaaagctaagttctaagatacaaaatgcccaaggcatttgtcggggaattcgaggggagtaaacaccagacaaatttacaccaatgagccatgagcaaccacataagggaatttaacaccacactttaacccaaaaccttaaggctcaagtttatgggtcttctccttacttatatggtgctcaacttttcaacttccatcctatgtgtgctcaacttttatgggagcaaaagaagaagctccatgctttgtcatccagtcaacacagtcaatggggattcatcttcata

SEQ ID NO: 299489 - DNA, 325 bp, Glycine max
  unsure (1)..(325): unsure at all n locations
tgagctcttagaagacatgcttcttcattagtgctnattcctctttcttcacaattcagtcagtttaagatctcttatagctgtcagaaggtctcttaatgagctcatttcatactgtgtgcaagaagaggatagactgaagcacgaaaggactaaaagtgctcatgtagtaagtacttctaataaccagggccaaagagaaaggactgacgagcccaagaatgaaactaccaatggtccaacacaaaagaaacaaaatcaatgtgacaactggttcttttgtagtagcgctgacattgtaagaagaaatgtccaaatatcattc

SEQ ID NO: 299490 - DNA, 390 bp, Glycine max
  unsure (1)..(390): unsure at all n locations
tatctntcatcttattccttcacaaataactttcataatgcataaacctagtagaactacccatcatatctcccagaacccaatacccacaataatttatgtgagaagaagtctacccaaacctgaaatttgaagtcccacaacgtagaggtgcgcttcacgactccgaaaatggcttccttttgcgatttggagcagatatggtgagtaaagtttggagctttgatggaggcttcaggagaggaagaaagggagaaaaagcaacgtgagggagagggaatagcttctgaacttttggctgagtgaagagagatgaacgtggcttttagtataataaggcttcctttntttatttttttacaagggtatgccacatgtctccttttgagt

SEQ ID NO: 299491 - DNA, 495 bp, Glycine max
  unsure (1)..(495): unsure at all n locations
tgacaccgtcttgagccgttctacnacgttgacaacattgtgatcagccgtcaanaacatatagtcacgctctggctatacaacttttaatgtgaatattaagggatagggctattttctaatcctgctgcggagattatgactctcgcgtacatatgagaagtcaaactcacgggttttttatatgtgtctggcgacagactcaatgcatatgtccaacagagctaaggtcctccattggatggggaacaatcaaggctaacacgagctctgtttatgcgtgttttactcggtgcgaatactactgaccgcggacttgattcttgcatggaccactgttacactgaccaggcttagtagctgctctgagggcagatttgaaggcggctaagtttaagtactaatgaagcgcttatgtaaccccggcgcataaaaatttctctggcgctcgggtggggtataccgattaacgggtttggcaccatggacatgcac

SEQ ID NO: 299492 - DNA, 335 bp, Glycine max
  unsure (1)..(335): unsure at all n locations
tgcttgtcataagtctataccgctgatttaatgtaattagagcctatagatttcctttctcttttgttttctgaaatctacctcattaaataaacaaagagatcttgtttcatctgttcttgcagttccaccttttctcatatcattttgcatgtttttgtttctttggtcttgcttggtatagatatgagggtcgattctttgaggatcctaacaacgagggtttgacaatcgattntgatagagatataagccaaacgataaacgaggaagaggaagaggacgtcctgtcaccagagttggagaggttggtcgctcacgatgaaacgtgaatg

SEQ ID NO: 299493 - DNA, 325 bp, Glycine max
  unsure (1)..(325): unsure at all n locations
gcttctccctatttgctatcataggggaagatgtgaagaagattttggttcagccccttatgcacttctctctctgtcgaatntgctgaggaaaattatcttcgtgaagaaaattcaagccgaggcgctttcgtaacgtttccgtgagtaattacgcgaagattctcgaccgttcttcaaggtccatcgctcgttcttcgttttcttcagtcttcaacgggtaagtacctccaaccagcttttcatttcattctatgtacccgtggtggtgcacattctgtttcatgtattagtattcccgttctcatttgctttatatacaccc

SEQ ID NO: 299494 - DNA, 389 bp, Glycine max
tttcttcacttgaaattaagttattcaattatatgagttcttgatttaatcccaatattctctccccctttggcatcaacataaagccaaagtgtgtatagagacataaaatcatacacaaactcataatcatccaagcattttaatccatacaacaagcaaggaggacaataattcatacataaactaagcaaggaagataataattcatccattaactataataaagcgtcaaataattagaaagtcatccaagataaccgaaataaaaagactaatttagagagtaatatactaataagtgtatcaaatatgtcataagacatcaacacatataacaaatcacttgtctaagtcactagcatctagaagttctaattctcttctaa

SEQ ID NO: 299495 - DNA, 327 bp, Glycine max
cgcatgtcatcaagtaataatccccggacgaatttatggtatgatatttgcccctctttacttgcctctcatcggagataagatgaaagcaaacataggacactgatctcgtccgtcctgccgttcccgcgatgacgactcacggctctattccttcgtttttcttctgcatacaacaaaatacgaactacaacgagaacaacgactattatgtacatatacacatatacacatatccggcgaaggaaccgaaccagaaaacaccagaattacgggtttcccagtcaccagaagcttcgcgcttgacaatggaggacacatgaatag

SEQ ID NO: 299496 - DNA, 377 bp, Glycine max
  unsure (1)..(377): unsure at all n locations
tgcttcatgatgatgaatcaagattgattcaaggagttntgatgataacaaagatgatgacaaaaagcccaagagaatgagttcaagattgagtcaagaacacttcaagaatcatgagaaatttgatttcaagattcaagaatcaagtttcaagaatcaagaatcaagaataatcaagttgaagattcaagaatcaagaaaagactcaatcaagataagtactaaatttttttttcataacattgagtagcacatgaagtnttcacataagcttttaccaaagagtttttactgtctggtaatcgattaccagtntactgtaatcgattaccagtagcanaagttgttntcaaaagctttcagattgaatttacaac

SEQ ID NO: 299497 - DNA, 394 bp, Glycine max
  unsure (1)..(394): unsure at all n locations
tgggggacanaaccaaaacccaagagagaaattaacaaaacctatatgagaggggagcaattatattcctaaagaattctgtcctaacaaaaccaaagacagagtcctagcaagtgtagttctcatgagtcaaagtgccaaggttagcaagtttatttacacatgagttttcctctctataaacatgtgagtaacaaaaaactatatttttacaaaaaanaataaacattttcccatttactatggagacattaaggaaccaacaaaggattgctgaaagcctgaatgaccaatgaagagtcacattcaatccacaaattattccagcctttgcacttcactacttctaaggtgatgcctacaccttagcaaaaaaatttgtttaacccctata

SEQ ID NO: 299498 - DNA, 346 bp, Glycine max
  unsure (1)..(346): unsure at all n locations
gagggagagatagagagagggggggacatgatattgaatgaagaaaaagggagagaatttgaactttgagttgtgtctcacaagactctcattcatcanagttacaactagtgttacacatgcttctatttatagactangtagcttccttgacaagctntcttgagaaaacttccttgagaagcttctttgagaaaacttccttgagaagctagagcttagctacacacacccctcttataactaagctcacctccttgagaagcttccttaagaagattcctaaacaagttagagcttagctacacatacctctctaatagctaagctcacctncttgagatga

SEQ ID NO: 299499 - DNA, 467 bp, Glycine max
  unsure (1)..(467): unsure at all n locations
cgctctanatctacatttgatggtttgtatttatgaggaggagggtatattgtcatttcttgctataagagtagtgtcccactggtaaaattaactttccaaatggttgccttcgcatgaatggccacgaggaagcttgcctcaaagaggtccacgaaagacaaggcggccgaatgaactcattccgctccggagtacgacagtcaccgctttaggagcgctgtacaccagcaactgcttcaagccatcaaaggatgggtcgttctccaggagcgacgcgtccagctcaaggacgacgaatatactgattttcaggaggaaataaggcgcccgcggtgggcatcactggttactcctatcgccaagtttatacagatatagtcctttgagtttatgccaatgccttggccacagaaggcgtgcgtgacatgatatcctgcgttacgggtcagtggatcccgttcaag

SEQ ID NO: 299500 - DNA, 384 bp, Glycine max
  unsure (1)..(384): unsure at all n locations
agcctttatcttattctctaacaccatgctttccatccttgattcgtccctctcggcctttctaagcttgatctcgttactgctgccccacagagcccctcggaacttgttcctgctccattcttcatttcgggcccattttgtttctcgctctaacgcttcaactgtggtcatgttgatatccttcaattcatcacactcttttttgaccctagtgactttcgtcttcagcttctctttcaccactcttgtctttttgagttgtactttcaaagcttgcacttcttcactttccttaggaatttcagcctttntcccacttagacattntagctntgggagccaagtcatcccttgcgttctagacttcaaccacttgtgata

SEQ ID NO: 299501 - DNA, 557 bp, Glycine max
  unsure (1)..(557): unsure at all n locations
ttgccacacatagcattgtgtgtgcaattatatatttgtcccgtctccagagagacgtgacacgtggttcataccttagataacctanagcacttgtattcactatagattatggcgtacatgcgtatcttgaaccatatatttgtactactccgcgggatctattgaactattgaatagaattcagtgctcggctgctgaatcactcgataattcggcgtaaagaacgccgcgtgctcgttatatattcagatgtaagactgaactggccagagtgttgaagacttctcggtcgtcctcgcgcacgcacatgtcgggactcataaatgctgggttgagatctctcgcacttattaaaatatgtctacgtcgagcatgcctaatatctcgtagccaatagcacggtgaaaagacatgcggcgctcagaggacgcgcacatagtgagcgtctattctggtagtatattatacgtgctgcatatcggcacataaatgtaatagagaccagtggcgcagtcggaccggcacaagtactcggcatgatttggcgtcaaacg

SEQ ID NO: 299502 - DNA, 320 bp, Glycine max
agcttcaaatggaagagagagaccgatcacgagcacatagcatggtcttaaaagaagagttagccgcttgctcaaggtccaaaaggaacttgactcaacgtttatgcgagatagagaccagcatgttagctatcatcaccaagtaccaagaagaactaagtctagccacggcccacaagcatatggtggcggacgagtatgcccaagtctacgcggaaaaagaggctagaggaagggtgatcgactcgttacaccaagaggaaaccatgtggatggaccgatttgctcttaccttgaacgggagtcaagaacttccccga

SEQ ID NO: 299503 - DNA, 350 bp, Glycine max
  unsure (1)..(350): unsure at all n locations
tgtagaatggctagacatgatacatgtcagggtttggtttggttcaaggataaaagggatgccccacattatttccatgacacanatgcaaaaatgatgatttggaaattntatgcaaaactggtcatgcatgcacctatgcggacactcaagtgtcaaatttttatggtcatgtgatgctagggctcaagattcatttcctctattttagatcaacccaatgtttccaaaatatgttcttttatcaatttgtgcattcatccgagtccattttgggtactcgggagaatnttcacagcattcacccttcaggtgtgcacacatttttttttcaacaactagctatgatc

SEQ ID NO: 299504 - DNA, 403 bp, Glycine max
  unsure (1)..(403): unsure at all n locations
agcttgacttgatgtaagacacatcttcttcaacctttgtcattcttgactccatntcattgaagcacttatgcacttgcaattccaaagtatcaaacctctcaccaacaaaggtttgaagaccatcaaacctgtccataatctttgaaagaagagatgaatcttctccttcatgtccttcttcaccaacatttctagcacccttcttcacccaagagccatcatgctcctttacataaccaaaggatgctatgactgaagtgcctataaggaatgatctcttgattggaacacaaggttcagaatcaagagggatattgaagtgttgaaggaaaagggtaacaagatgaggataaggcaatgggtcattcaatcgcaatgccttatgcatgcgatatctaac

SEQ ID NO: 299505 - DNA, 402 bp, Glycine max
  unsure (1)..(402): unsure at all n locations
tcgatggagaagaataaagcgcgagcaaaatagggctcgcaatctaatattntacaatgtatgtacaacatcggttatcaatacaaaaccgatgttaactaaatgatgttaacattaacatcggttttctacaacaaaccgatgttaacctatcttatgttaacatcggttnttctaanaatcgatgttaacatactgactttaacatcggttattcaaaaaccgatgttaccagtttcatgttaacatcggtttttaaacaactgatgttaacataagctaattaacatcggttttctaaaaaaccgatgttaacaaattcacattaattacaattatgccaccatgttaacgttaacatcggntttgaggaaaaccgatgttaaacgtacgatgttaaat

SEQ ID NO: 299506 - DNA, 314 bp, Glycine max
acatgtcgctgggttcagccttgccgtcttgagaagattgtaacctgcttttgctggcatgttatactcaaggtttgcatatttgagtgtcgttggagatctttcttaccttgcttattttatcaggggcttcgtccagaaagatggtgctaccatctgcattcatggcacagaggataaagtactggggttgaaagccaaatatgaggacgttgcatggggattttagagcactgagatcagagagaactttgattctttctcagtcagggcggggcgatgtatggagtatttataggctgatctgaggattc

SEQ ID NO: 299507 - DNA, 324 bp, Glycine max
ctaagatacgcaagcttgtattgagaatctcttcttattaataagatgccaactaacatattcttgagacctatatgtcggcaattgccagctgagaaacacacgctcacacacattaaaacatctactccctcccacataccaacccagttatgtgagccatcattaactttacttatgatgattatcattataaatacataaatattataaaacagagaaaactgcctggataccagttcttcttgattcttgagagtggttggtgatataggctagcaacaactcttggaaaatgcatggcattcttcatagagagacaat

SEQ ID NO: 299508 - DNA, 394 bp, Glycine max
  unsure (1)..(394): unsure at all n locations
aggctgcagctatcttactttgtagaggcatcacactcatatcactgcatgttggattgtgtaaaaaactccgatttaataatacccactgcatgtaaagggtggtgaagttggcaatcctatcttttatcaatgatngcaaggatatccttatacttcccttcattgntattgaaagctctttgaattgattctttggcctatccattgcttcataaatgaaacccattgcaggttnttttttcattatccaccaacctcaacacacttacaagaggccccatagcctttaaagcataaacaacatcattccanaatgatggcgtaagaatacatatgtggcttgcttccccttgggctctttagctgccttagacttcaaccattcatctga

SEQ ID NO: 299509 - DNA, 435 bp, Glycine max
tctccgagggactcttgatcctgttacttccatattatctcttcatatcttctcttacactctcaaagtatacaaatatttcatttaaacctcataaatcatggattcttgttctattttttaatgctgtgggtgcttggaatcatgaaatatcattggactttagttctatgttgcaaaagaatgaaactacatcaatttgaattttgatctaagaccttgctcagtttttatttaaatcttggagtataattgttagtaatcttagtcaatttttacgttttctgtgtctctagatcccgtggtaatgtttttggaattgctgagcactcctccaatgttaatcattttcgtactcttttctaaacactatgtgatttttatatgtatcactacttcctatattatacagtttttatattgatacaccatgca

SEQ ID NO: 299510 - DNA, 412 bp, Glycine max
  unsure (1)..(412): unsure at all n locations
agcttcctctgtgccatttcctgcgaaggcaaacatttggaaagttagttttaccaagaaatgctactcttanaacanaaatggcatacaacctcctccaataaacacaaacatcaatgtaaatntagagcaaactcatgcacatacttccttatgaacattcactcgcacaagatattcttctatctaagaaaaatgcacccatgcacaatcaaggcaccttcattacctagattatntatatgtacttncaaggtgtatntgctacctacatcacatgcacttncttggctaaatntacatacatgtatactcaaagcattttggctaccanaaattgcacacgtgcacattctggtatttccaatacctatgcatatacaaactntgtgatgaatcttggctatctaca

SEQ ID NO: 299511 - DNA, 321 bp, Glycine max
  unsure (1)..(321): unsure at all n locations
tataagcagcacanatggagaagttgttcaattcatggcatcttcctatctaaactcaagctttgccgtcaattaacctaaagcacaacttgatttatggctttgaactttgaaaattgaataaaatccaataaacttatatttcgattctaacaaactaacatttacaattttaaaaaataggttctaaccgcacaaatggaaaagttgttcaattcatggcatcttcttatctaaactcaagtttttgccgtcattaacctgaggcacaacttgattaggactatgaactgtgaaaatgaatccacccaattacttata

SEQ ID NO: 299512 - DNA, 401 bp, Glycine max
tttcttctctatgaagcttcctagtctataaatagaagcatgtgtaacacttgttgtaactttgatgaatgagagtcttgtgagacacacttcatagttccacttctctccctcttttattccttcaatttcgtgctcccccctctctctttctctccctctttcttttcctccattgaagcatccttccaagcttcttatccaaggctcatcttggtggtgaagctccttcttccatggcttattccctagtggatggcacctccgctcacctcttctcctttgacttccgctgcatctccatggtagaaaatcaccattaaaggacctcattgaagctcatagatccagcctccatagaagccccacaagtaagcttccatcataagtgcactgacctt

SEQ ID NO: 299513 - DNA, 203 bp, Glycine max
tgactatgcgagttgatttagccttagtttctctatatttattattcaattcgactaagaatgagaaatctcaaagagaaaacgtccgattgattattcgctttatttcgctaacagatggttgttgattatgatattaattgtttacctctattttgattgccaacgtggttacggcacgaccgatcggtctgattttttta

SEQ ID NO: 299514 - DNA, 374 bp, Glycine max
  unsure (1)..(374): unsure at all n locations
ttgcttgttgacacgcggagatntacgtcatcttttgtgctcacaagatttgtcatactgacatttgagtcacgttgacgggcggagataccctagtggttatccgtataaacattctttnttgctgtctgtaaaacgaaaagcctgatagcatgcagagactaacgtcgtcttctgcgcccatcgtcaatcgcggccgacaagcccgttgacacgcagagatttacgtcattttccgcgctcacaagatctgtcatactgacattngagtcatgctgacggacggaaatacccaagtggatatccgtataaacattctttnttgctgtctgtaagacgaaatgcctgatagcacgcagagactaacatcgtct

SEQ ID NO: 299515 - DNA, 233 bp, Glycine max
  unsure (1)..(233): unsure at all n locations
caccgctttaggagcgttgtacaccagcagcgcttcgaagccatcaagggatggtcgtttctccgggagcgacgcgtccagctcanggacgacgagtatactgatttccacgaagaaatatggcgccggcggtgggcaccactggttacttccatggccaagtttgatccagaaatagtccttgagttttatgccaatgcttggccaacagaggagggcgtgcgtgacatgag

SEQ ID NO: 299516 - DNA, 591 bp, Glycine max
  unsure (1)..(591): unsure at all n locations
acacccgacgcggcatacagacacgcgaactggagaacagaagcacggacaganaggactcgcgaaaggcgaaaaacacaaaacggagnggnattggaagcccgtggaaacaccanggcgananaggcnaaancacacgggaacccgcggaaacgacacagagcgcacggaggcaagcgttgctgancgacgaaggaacaccgccacaaagggacgaacngcagcaacaagacaagacccaccgcgaaanccacaacagaacgacacacggggccaaaccaggacacggacgaacgaagaanganagcgccggagaacggagacggcggaagcgacanaacagacgcacacagacaccgggcgagacaccacgaaaccgaagcgagagccggccgacggcaagcgaaacgagagacaggcaccgaaagggacacgacaaaacgaagaagaagcgaaggcaacaacaagcaccggaaacaaacgacgagagagacaagacgccccaggcgggagcggaacgcaggcaaagcaaggcgagcacgggaaccacggaaggaccggaaacaagagcaaaacggagcgaacgacgac

SEQ ID NO: 299517 - DNA, 223 bp, Glycine max
tgacccctgcattacgcgacctatgaatctcagcttctcatatattatgtggctgaacggactttttttgaaagtatgaccattgatatctcgagaccttggtagtcaatatcaagcgtatttatgtattatgcccccgaatcgcctttctgtgacatgtatgaccatttgtattctcgaaagcatcgatggtcattatgagcctcttgagcattatgcccat

SEQ ID NO: 299518 - DNA, 202 bp, Glycine max
  unsure (1)..(202): unsure at all n locations
tttctntatgagaaagagacatatcaacgaatgttactacatagcgattatagagcattggatttttagcagatttaagattcctattagtgttttataaacctatgtaaagagtctatgtcaatgcccacttttttttttaatttctctttgttccctacatctctttccttttggatttttttggtgggggggggggggg

SEQ ID NO: 299519 - DNA, 370 bp, Glycine max
cgcatcagttgaggctcgggttcttccggctccatgggtaatcatctcataattaattaaattgtttacaaatgttgtttgcttttgcacttttgccgttatgcttatattatattttggctcttcttgtccctttagttgaaatatcatgacactggaagagagaaagaatacttgccacaagttggtcagtggaatatgatgaacaacgtcagctaagaatgaacaaataatgtttagatgtaattattttattgaaagataagaaaagggaaaattacttgtttccaacttactctaattctgggaaatctaatgcagaaagtataaatggaagtactgtaagatattgggcatgtatcaacttctc

SEQ ID NO: 299520 - DNA, 405 bp, Glycine max
  unsure (1)..(405): unsure at all n locations
ttgcttgcgtagtacaactcataatcaaattattaaatgttttttgagaaaaaccaaattcatttagcgtcaatttcaagaagccccaatcaactttatcatagactttctgcaaagtcaattnttagcctaagattcccttttttattatgcatgtgatgggcaatctcctgagctattatagcattatcagatggatctctattaggaatataaatgctttgcaaagggccaataagactatcaaaatgaggttgaatgcgattaacaagcacttcagagataattttgagatcgacattgcataactgatgggcctaaactcttttaaggaagaagggcaatccactttggggatagttacaataagagtttcaaccaaacttggattgatggagcctaaag

SEQ ID NO: 299521 - DNA, 453 bp, Glycine max
  unsure (1)..(453): unsure at all n locations
ntcatggtggcgagaggccatgtgaagctaatattcanatatacatgcaagacctctctaggtgcgagttgtggcaaattttaatttatgggttaaagttagcttggagaagggattatcaaaacatcaagatataatcatattcccttacggcaattaatctcttgtttatcaagagagtttagctcaattagttgaataaaatgatgtgttgttgtgaatccttagtacctatcgtttgattgctacaaattaaaaaaacaaatctctcgtctaaaggtttctgttgtggtgatccatgtgcgagtttggtcaaagctatttatgacagccatcggagtaaaggccacatttactgggttcatgtgctgatggaatcccatcaggtggtagatcgatcttatggcaaatcatgggttaaactttagagtcttcatatcatggtgcctatat

SEQ ID NO: 299522 - DNA, 376 bp, Glycine max
  unsure (1)..(376): unsure at all n locations
atctgattttggattggcaaagctaaatgatgaggacanaacccatntgagcaccagaatagctggcacttagtgagtgtccatacatttcctttnttaaccatttgcattgatcattactgagctatatgttggatccattatcatactatattataatttcgccaagcttgatgatggggataaaacccatttgagcattaaaatagctgacacttagtgagttcccatacatttcctttttaccattntgcattgatcattattgaggtatatgttagacacgtacattatcataatataataataatcaagaaaaacaatagacatcatgtattgaaatacctcatgatcaaatntanatggaacttacact

SEQ ID NO: 299523 - DNA, 283 bp, Glycine max
  unsure (1)..(283): unsure at all n locations
ataatataggatgattatggatccaacatataccttagtcatgatcaatgcagcatggtaacaaaggaaatgtatggaaactcactangtgccagctattcttgtgctcacatgggtttctgcctcatcattaagcttagcctagtccaaatcaaatatcttggggttgagatctttataccacaacacattattggccttgatgtccctatgaacaatcttcatgttggactcttcatgaaagtagccaaacctatagcgataccaacacgaaatctatgct

SEQ ID NO: 299524 - DNA, 375 bp, Glycine max
  unsure (1)..(375): unsure at all n locations
agcttaatcttatggcttgcctccagacttcactccccgtaccgctccagacgatttgaaccaagcccctaccttcgaggggcaactccctccttatgccgattatcccctgcaagaagacgatgaagaagatgcccgtctaggccctctactgcccctcaaggatccggccccccatgaattgccccaaccaaacatagtccgccatgtcccatctccacccgcacccgttaaagaatctgttccctttgcaaaagatagggaaagattgatttacttgaagagaggctgagggcggtagaaggcctcgacaactacccgttctcggatntggcggatctgtgtctggtacctgacatcgtcatccctcccaag

SEQ ID NO: 299525 - DNA, 810 bp, Glycine max
  unsure (1)..(810): unsure at all n locations
gacccaacgtacctaantncaagcacaganacgtacacagacagngntatcgcacttaaactaatcnantccntactancnanccncagagagcgcngattggacgccattaggtaganangccattgataganacgtacaaccnaccgacgatcgacagcantaactataaaacgatgcgatcgagacgtcactacgtatatgtgtcacacaacgcatatcactacccataagaacgcaganagcgacgcactatatgagacagcgagcttatgaatatcatcagcngagcagtacgcactcactcnctgacgcanctcnnatgtagacggcatgatatacatcgacgcacatgaatgagatacagacacgcatgaacgcacacgagaagcggagnangatgatacgaacacagccgactacaactgcgaggcctgtaggcacatacgacagcatacactcgacgacgtagtctgcagaaacgagacagagagaagatacacgaagatagtcaacttaacacagcataggacaataccaacagatcgagcatgaaaataacggctggatgcacaacggagctgacgacagcgccaacagacgactgtgatgcacgagacgtacaaacatcaggacgtcactcgcgatcacacctcacgcagagtaacaaccctgccacacgagtgagcagaacgaacacgagcagacgaccgacgagcattgtgctctagggagatcgcacaacgaggacacactgatacgacatagacggagtacacaaactgatctcactagacacagccaaccgcc

SEQ ID NO: 299526 - DNA, 326 bp, Glycine max
  unsure (1)..(326): unsure at all n locations
agcttttatttaataaaattaattaaaaaaataaggattttttttacgtaaaggctatagatacaaagcttcacactaaaaaagaaacatctcaactacgttgacaaccctcctcctagtgatcacaagcaaaggcgtacaatttattcaaataaaaagaagaaatagatgaccaacactacgaaaagaagtcttgtatgatgtctatgttaagatggttatcgaaaagctatcctcggttaagtagtggtggcattttcgtaaacaattataacttttgaaagacggtcattgcanaaccgtctttaaaacaacttttcaaagat

SEQ ID NO: 299527 - DNA, 480 bp, Glycine max
  unsure (1)..(480): unsure at all n locations
gcgccttgacccctgttganccaatctagacgtgacaccttggcataagcggcctcaggatgtccagatggagaggggtttcagactgttgccccgatacgtttgacggtttagatctggtcacaagaagtgtggactaacctacttccacgatactttggattaatcagaaactatatcacgagctactggcaacacacataattggggggcatgaggttgcgacacagcaccatatctgattactgttgcattggacacagcatgatccccacatatgagtctccgacgaaagcttacaccccaacgactgacctctgcctggatgcacaatctatctgcattgacaatgacaaaggatggtttctggctaatatcggcatttaacacgcgctcaatgtagtcactcgattaaaatgggtctcttttccggaatctaaagggacctcatagctagataacacttccgaataaagatcg

SEQ ID NO: 299528 - DNA, 413 bp, Glycine max
actatatgcctcgggcacacaagctatctccatactggctcgatgagatcaatataatctcgcaaccttgtcagcaaagaactcatgaggttataatgcttcactctaactgactcaccatacaagaccatttgctcttgctgtgcatgcaatctggagcaattgaacaccctgaagcctatgctgcagacatcaacaaaagacctgctctacctcaacaacaaaatctgccacaacagaaaaataatgacctctccagcaatatgaacatatccaggaggaggaatccattcaaccttaaatggcggagccgtcacacaaccacaacaacaagcacaaccctatttctaaatgctactggacaagaagccatatgtccatcaccatccacagcacacaacacagcacagccc

SEQ ID NO: 299529 - DNA, 238 bp, Glycine max
ctctgcagggaatctaagtgtgaagcatgctattctgcacacgattgtagctgccaactgggtacccactaatcatacttccactgttgccacaagttcgagtaaatttctgtatgctgtcggaaccacatccaaatattatctggaaactatatctttgatcaaactgtcaaacattcataatctttagctatcaaataagccattgccttccctactgtattgtgtgcattatgac

SEQ ID NO: 299530 - DNA, 401 bp, Glycine max
caagctggtttactatttctgcactaaattgttgttgtggtaatcaaatgcagatgcaatgcagtagaagggggtaaagacaatatattactacaattatatgaaattgagtaggtaatactaagaatagaatattagtagcatgaccgagaataaaatagccgttgtgtcatataacataacaattgtctcacatacagggaaaaaaaatactccaacgccatcattagccggttgacttattgctgtctttaataaaatgttgcccatttcttttaaatgtggtgatgatgccgatgccaacagtgtgtattatcaaccactgcaagtttcataattgtaagttagactgcaaaaataaaattcagtccaattgttctgaagttatgcataccatggac

SEQ ID NO: 299531 - DNA, 410 bp, Glycine max
  unsure (1)..(410): unsure at all n locations
actcaagctgatgcattcttttcctgcagaaggcaacacaatattcaagacttataaaaatgatatgctggtttggagaagatgcaatctatgcaccatattaaacccacaactcaaccttccacccaacacatgttgaccctcctccccaaattgaaatcaaattcttcgtataatttctctaactcttttctcgccgagctaacaaaaacctatatctaanatattttaagaatgtctgtcactacaggacatacattagttacttagattacacaaacaattgaataatgagcgttctaccttcatagtggtttatattatcctttctttattttacaacttatatgaagatggctttcttgtttctccataaccacttcattaagcatttgtaaccataactcttc

SEQ ID NO: 299532 - DNA, 316 bp, Glycine max
  unsure (1)..(316): unsure at all n locations
agctngatgtagatgtatcatatatgngnncnnaacaatnggttnttgagtgcgtggttatgttcgtgagtggaattatttgcattccatcttgcaatggaagaatgagcagattttatgtatgtgtttgactgttttggtaaaatgtgatagtctcttatggacaccattcacctatttgtgctgtacaatatatgaggatctgatgcaccaatttcatatgcaactgccaagtcatctgaactgttggctgcccagaggagcttcatagcttgttccaaagctcctacttctcaacctcctccatgagtctgat

SEQ ID NO: 299533 - DNA, 364 bp, Glycine max
  unsure (1)..(364): unsure at all n locations
ctgagaatggctagacatgatacatgtcagggcttggtttggctctatgataacatgtatgcctcccattatttccatgacacaaatgcataaatgatgatctggaaactttacgcacaactggtcatgcatagcagcctatgcgcgacactcacagtgtgaatataattatggtcatgtgatgctcgggctcaagattcgtttcctctattttaatcgccccaatgtttccaagacatgttcttttatcactttgcgcattcatccgagtccatancgggcgtccggtgaaacatcacagcattcacccttcaagtgtatacacgttttccataaattgtttatgatcaatgaatttgtttct

SEQ ID NO: 299534 - DNA, 397 bp, Glycine max
  unsure (1)..(397): unsure at all n locations
agctntgtttataagctcgaaaagacaagagtggtgaaagagaagctaaagacggaagtcactagggtcaggaagaagtatgatgagctgaaagatatcaacctgaccatggttgaagcgtcagagtgggaaataaaatgggcctgaaaggaagaatggagcaggaacaagttctaaggggctttgtgggggcagcagtaatgtgaataagcttagaagggatgaatcaaggatggaaagcatggtgttagaggataagttaaaggcttgtcagaggtcgaagagaagtttgacagaacagctgagcaaaatagaagagaatatgttgataatcattgatcaatataacgagaaggtgaacctagctgctagtcatggacatatgctggaaggtatc

SEQ ID NO: 299535 - DNA, 478 bp, Glycine max
  unsure (1)..(478): unsure at all n locations
ttatcatcattggtattggtgtatcaataaaaatggtattgttgtaatgttattttgtacaattccacctttgtacaattaaaacatcgtataaatattttgtaatgtaattattgtgtataattttaaattgtgtaagaatttactgccaacgatttgtcgtatgatttgtgctactaagatccattgganaaaataaaaaatagaatgtggaagaagttttgaatctcccaaagtacatctgacatggatacaaacttgagtagacgttgctttgctacatattgtactctttcattaattagaagtttcatactagcttccactctcttcatctttctccaatgaatgtaagaagaataaattatataatggaacatttgacattgttgcttccttcggtatcggcgatatatatagatcgattctgaaaacataagtctgtgtattatcattagcatatatgatccttatgttc

SEQ ID NO: 299536 - DNA, 337 bp, Glycine max
  unsure (1)..(337): unsure at all n locations
tttcttgcatttctctcttcccttanacttcttttatttattgctatgtatctcttgctttaaagaagttaattatgaattgtcttttgagtaattcatgttaacggtgcattgttaatccgaaaagagagagtgatagtttaattgaggaatagtctttgtatcttaattcaacccctttctttcttaacgttactgaagccatttgtcaacatcctattcttgacaactcgcttctctaagaagaccaactctcctgccttgataaatgaagccccatgaacgtctatatttttacttgaaaacacagtcatcaaatgtcctttctctttttgaa

SEQ ID NO: 299537 - DNA, 480 bp, Glycine max
ctactgatgcggcatggcaggcttacttcactatcttgactccgatgcgagctatgatcactgctcttccttcccgcgacgcgtcttcatatgttcgcctgagtgggcttatactctataccatactatccacgatgactttggctatatcaagctggcatgcctgcgatgtcgttgcctagacccatatcgggttcataaccgactcccaacataactccagccatcattacatgctggattggacaggcaatgcttccccagagaatgagttcacggatgaaattgctgacaccttcagagcactggatagcggtttctaacgacctctctggcggctacacttaaagcatataggatgggcaacttctcaagatgactccctcgcctgagacaagaacagatggcacctcaatacaaattaaactttcgtggagggtgagggaacaacctcgttgatggatcataggcgcccaggag

SEQ ID NO: 299538 - DNA, 403 bp, Glycine max
  unsure (1)..(403): unsure at all n locations
tgaagccctgacacnttggaanacaggttgancccttgaacccacgnatttaagacgtcccagggaacttttgcctttgatacggcaaccacgttgatagagacatcccaaggaaaaggtcgttcttcagctaagccaggcatcaatccaatctacggcaggtaatggcccatgactgcggcttggcgcataagaacatcaaggcctacagggtgtagtactgatattctacgcaaccacttcccgttatggaatccacctttatgagatgaagcatgttgtatttacatcaatctaagtctggataataaggcgggaccatctgcttttaacccacctagaacacaaagttgttatagctaggctcgtagagccgaaagctacttaaactcaagactcatcc

SEQ ID NO: 299539 - DNA, 500 bp, Glycine max
  unsure (1)..(500): unsure at all n locations
cgccgcattgatccatcgtgagcgatgaanacttaaaccctgagaagtgcgaggacaagctctcaggcnaagctcgaatgatctctgcgtattctaagagaagttcacgttcatagccatcggagtctgataagagtatgatgaactatgggacgtcattatggtcaccgctgaagccttggaacgagaaaccacaaaggcctcgaatgaatatcactaccaatgcaaagttgtgacgggctctatagggcagctatattgatctcaacctccgatgaggtgataggactcatcatgggtcaaaggcatgaacctgaaggacgaactaatagcttgcctcaagtcaaatagagaattgatctcacgataatacgaaattgaaggattatgtggccatcttcatggtgcaaaataactattctacacgattacgactaagttatagtgattaccccgatttancaaaagggaccaggagagggtcttattcttgacctaag

SEQ ID NO: 299540 - DNA, 339 bp, Glycine max
  unsure (1)..(339): unsure at all n locations
tatctntctttcaattcacacgacaataacgttntactcggatgtctgattgagtcccgtaatatatcgataagctcgaaattgaatgttgaacctctgagcaaattcaaacgacaataactttttactcggatgtctgattgagtcccgtcatatatcgagacattcgaaattgaatgttgaagctctgagccaattcaaatgacaataacttattactcggatgtctgattgagtcccgtcatatatcgagacgctcgaaattgaatggtgaacctctgagcgaattcacaccacaaataacttttactcggatgtctgattgagtcccatattata

SEQ ID NO: 299541 - DNA, 546 bp, Glycine max
  unsure (1)..(546): unsure at all n locations
cgatgtgagacgatagancnccnttcgtttaganccccctagctatatangagacactactcagaatactcaagccttcaacagttcaattttcgagccgtctcgatatatgtataggcctctaattttacatnccgagtgacaaagtactctgtcttntgaattgcgctcaaagcttcaacattcaatttcgacgtgtctcgatatattacttggactcaatctgacatgccagataatagttattgtcacttgaattggctcagagcttcaacattcgaattctaacgtctcgatatatgaagggactcaatcacacattcgataaatagttattggcgcttggtatggtcagaagttaacattcactttcgaacgcctcaatatattactggactctatcagacttccgagtagatggtattgtcgttgaattggctcacatgttgaaattcacttcgacgcgctgatgagttcgggaccaacagactcccacaacaacttttgatcgtacagagtagacttccaattcattgttagcgttcg

SEQ ID NO: 299542 - DNA, 562 bp, Glycine max
  unsure (1)..(562): unsure at all n locations
caccacacacaccgacagggactgcgaagggaagacaaaaacgacgagaaacgccaagcacacaaaagagaaaatgaaccttgagacctcgaaanccaggtggaaacagcagaaccacacggaccgctaaagacgacccgcaggcaagcaagcaaagatttcagacgccgcacacggagcaggaacagcgggaaatggacacagaagggcccgaacagcgtagagagacagaaagaaacaagcaccccaagagcgagagaaggaaacaaccaaaagagcgggcgaggagcaaccacacaaagaaacgcacaccgaggaacaaggcaagagagcagaacgccaagacntccaaagacgagaaagacaagaggcaacatcaagaaacgggaaagggaaccggccgacacgatgagaacatgaaaggcaacgggagtcgacacaacggaaaggcaaacgggtgaatcgacagcaacacaagcgccaacactagaacggaacccgacgaggacgagcacgacaaggcaccaagccgcacggggacggcagcgtgcccaagagcacg

SEQ ID NO: 299543 - DNA, 504 bp, Glycine max
  unsure (1)..(504): unsure at all n locations
cctgcctgtttaacacgtagtcggcggtgtcacatantccanccctcaccgaggggatgtgacctctaaaccccgtcagtcagttgacgcaacgggcacgaccactccacagcagaagatttttactgccacacacatgtcaccacgcctcacagtggcatatactctcctctcgtcgcagacttggtctacatcatatgggtggtgccgcaaatggcagattcctggcaactaaacgccgtcgatcgacaatgactctgcgactaacctcagcatactaaggacgcgtgtaaggcaaagatctgcgctagcagacctctcatgcatggcacgcccgacgatgtcgggtgcatctatcgcttcgaatacatcatatacagaggggatctatgtggttagctctgagtttgttctcttagcgtgatgatacgtggtggcaacgcgctcgggtcggatcggactcaccactacacgccacaactgtgctcacatagaggcggcatg

SEQ ID NO: 299544 - DNA, 96 bp, Glycine max
ttcttgcttttccttggcctacataatttttttcagaatacacgttgttatcatgtgctacaattgtgacccttctgattaaatgtcagatgatta

SEQ ID NO: 299545 - DNA, 514 bp, Glycine max
tcacacgttgttgaccccttcgaaccttgatacttggcattacgcgcctttaaacaccgcctcactactatttgtcaaacctattattcgaggcgaacagtatctatcttcccgcaaactatgtagtccatcccctgcatggaagtgcatctaaaatactataatttggtttgccgctatatccaacaatcttcaaggtgggcttaagggatagataacctacatggattgaaccttgtctgctacacacgaattaagagaatcatcttcttttgactgtatggatagcgactcctcgtattgctcttctttccaatatcttctgtcgccctcttaacgatttcatattgctgtgttaacataatgccttacttcttatagggattcaaatacccaagcactagtgtatgcgtttgattatctttcctcttatacaagaaacaacaacaaaggcctattaattgagttggaaaggatctttcgcatactttactcctatatggaacatatcgcg

SEQ ID NO: 299546 - DNA, 321 bp, Glycine max
  unsure (1)..(321): unsure at all n locations
tctctagggagatcctttggttccttcttccaaggccaagggtaataattctaatcttaggtcaaggttaagggccgatgacctgaggttttggctcataagacttgtagagggccggacatgatgtatgtaagggatatgtgttcngtaaccgttcagggataacggaatgcccatattatttccatgatacccatgtggacactcaaacatcangtntgtagtaatgtgagactaaggcttangattcatttttcccatttaaatcaacctagtgtntccagaagatgtgntttatcaattatgcattcatctgagtct

SEQ ID NO: 299547 - DNA, 319 bp, Glycine max
tgaccttgaccctgaacctgaaacgccataactcgcttgagagatacattattcccaccccgttttttgagcagaatcctggaaactcccgatcgatccaaaaatttaggacagtcgactattgaggggattaaagtttaaaccgcaacccgttgttccaaaattttaaattttaagtccaggggcctcgtatcctccccggctgagaacccgccaggggtaaaaggacatggtgagcgccaggtttcaccgaggtcgcattaggggggccagactagcgcggtgacccggggggggccccttaaatcggggctccacg

SEQ ID NO: 299548 - DNA, 357 bp, Glycine max
  unsure (1)..(357): unsure at all n locations
agctttgctagaaaaggttgagtattttctaananaattatcgaaatttataatgggaagagataacttagaggcacttcttgcccaacaaaagtgcgttattgaaaaggctgggttgggatacaataacaataagaaacagatagctgacaaaatctttttcaacgttacaaaagcttccagctcacccatcatagtatgctactactgtatgaataagggacattcttcttttaattgttgattaagtagtttggaattccaagtgggaaatacaaatgggttcctatgggaactaataaggttgctaaccaataaggacccgacataatttgngtacatagatctacctctcta

SEQ ID NO: 299549 - DNA, 297 bp, Glycine max
aaccgcccagagacagggcaacacacccccccaggctgactgaaccacaaccaccaacgccaagcaccacgacgaatgccagaagcggaccggggaaggcagcacggaaacacggagagaagcacccgacacggcaccgagagacggacggaaacacagggcaggaaacaagacgacgaacaacacaccgaccaaggcgaacaaggcaaaggaaccacggaggggcccgcacacacccggcgcacgcgcccccagccgaaaaaacacccaaaggcagggcaagacacacaagcgaac

SEQ ID NO: 299550 - DNA, 392 bp, Glycine max
  unsure (1)..(392): unsure at all n locations
agctntacattggttatcaattgtctaacataaacttcttcttttacttaggacttgggatataacatgttaaagattgcagcaaagcacaacatgggcaggttgatgacatgattntgaaattacaatagaacattatgccagatatttgatccatgtaccgaccccacctagtgagaaaaggattggtttgttaatgttgtatacaaattcaacatacttcaaatataatagtagttgtagagttccaagccaaaagataaggtgcatttaatgcatagtgggaattggaattttatcactaaggtttaggtggtttaaatgcaaagtgaaagattgcattntactagatgaaacttatttgaatggatgcattggaagttgtattgttc

SEQ ID NO: 299551 - DNA, 416 bp, Glycine max
  unsure (1)..(416): unsure at all n locations
tgctaacccatggaagctcctaatatctcccacactntntgagatgggccattcatggatggccttgattntctcaaggtccacttggaccccatttctaccaactacaaaccctaagaaaactatattatctacagaaaaagtacacttctctatatttgcatagagggtgtttttcctaaagactgaaagaacttgcctgagatgtcctgagtgatcatctangctcctactgtacactanaatatcatcaaaataaacaactacaaatctacctatgaaatcccttaagacatgatgcataagcctcataaaggtgcttggtgcattagtgagcccaaaaggcatcactagccattcatacaaaccaaacttggtcttgaaagcangtatccacttatcaccatttttcatcc

SEQ ID NO: 299552 - DNA, 404 bp, Glycine max
  unsure (1)..(404): unsure at all n locations
agcttgatgtgtgtattcaccatctttcatagtagaatactgggtaatgtgtctaccacacgattatcatctcctttccatcatttgggggtgccactgggctgccagatccctccacctttgngtgtatttctttgaaggattcatgctcctttttgcacatgttctatagttgcatcttatccagagccatatcagaattgtactgatactgcctaacaaaggcaaccgtttggtccttccaagaatgggctcgggaaggttccaagttagtataccangtggcagctgccccagtaagactttcttagaagaaatgtatcagcagtttctcatcttttgtgtatgcccctatcttccgacaatacatcttttagatggttcttcnggcaagtagtctcctt

SEQ ID NO: 299553 - DNA, 325 bp, Glycine max
  unsure (1)..(325): unsure at all n locations
tcaacctagaggagacggaccattccaagtgttggagaagatcaatgacaatgcctacaagattgacttgcctagtgagtataatgtaagtgccactttcaatgtgtctgatctatctctntttgatgcagatggaggggccttggatttgaggacaaatccttttcaagaagcagggagtgatgaggacataaccaaggtcaaggaccatgnaacacttgaagggcccatgaccagaggcagacttanacaagcccaacacgtcatagagacaaagctagtcatttgtatagctgccattgatgatgattgaaggcccaagtgg

SEQ ID NO: 299554 - DNA, 393 bp, Glycine max
  unsure (1)..(393): unsure at all n locations
agcttgttttcccnctctcttcacatgaccctcctttctcactaagggtggtgacccttcttcaggctgggtgattcttctcatctgaagggcctctatttatagacccatcttaatgttaaaaggggaagcaaatctctaatttacagataatatcttaataaaatttaaacaaatcctaaagataagataatatctttataaatataaacaataatcctagagatntgaaattacaaatttgaattgtttcccaacatcctctaccaaactctgttccttgcccctcttggcctgattcaaccgcctcttccacttttttccttctcctatatgcttgtgttaatggcctattagtggctctacatttatggacaagtttgcttgctactt

SEQ ID NO: 299555 - DNA, 482 bp, Glycine max
  unsure (1)..(482): unsure at all n locations
taagagtntaaccatgcgtagatatcctatggtaatatctcatttttttaccatttgaatagtgtaaaaacactacccaatcgcctaacaaaacaataatactgtctaccacacacacatgaaaaattgngatgttaccgtgtttgtttgacattctttgtcttcctaggagtgtatgtaataatatctttgtagcacacatgagaccgatgttgtttggtaagagaaaaataagattctagtaaatttagagagtttgataagcactgtgctacttcaacaaatataaagatatgtgaaatttggtgaagggatatcttcctcaaatacttgtcaattaatataagcatacaaaatanaattaaatataatataaatcataaaatattctactaattataagatcaacattggataataagagtaagaacacattattatttaaacagttgaaagataaaagtaatattattaaagaacta

SEQ ID NO: 299556 - DNA, 403 bp, Glycine max
  unsure (1)..(403): unsure at all n locations
agcttgtatctaacggtgattgcaagcgatgcagcataatctagatctctgacggaagacaagttgaaccttaattggtgaagatagatnggggaaatatngaatcatgatttatatatacgtcaacagcacacttatttatattcttcctttctctgcatctccctctatcataggagtgttaatttttagacacttaaacaatngaaacacttaannataatattggcatgtgttttttttttttttttatctcccacttcatttacattacataaacaatcatatatatttcaacatccacttattttanacatttcatcaataactcttatttntctctcttatcacatcatataatctatcatacatnatnttcttcttcttttttttcactatctct

SEQ ID NO: 299557 - DNA, 469 bp, Glycine max
  unsure (1)..(469): unsure at all n locations
ggattcaacttgggactccttccgttntgcttctgacacagcctgtctccgctaccatgacaacattcacctccagaacattcttccaaagaagaatgtggagctcgcccccacgatatacgacgaattctatgggaagctctagcggaggcaatggcatagacgaatgagaaacagattgatgtggtgttggtgaagagttctactccaacttttatgacccggaggacgactctccgaagcagtgctgagtgcggnggaagaccatcaaatttgacactcagacattgaacgatntcttatggacctcgtaatcattctggaagggggagcaactaactacatattcccagtacctccaaacttatcctgacctcccacacctctaaccttaacataggaccggcccgcctaatatacagactcgtgatgaagatggacatggatgtgggcagtatgatttcctttg

SEQ ID NO: 299558 - DNA, 404 bp, Glycine max
  unsure (1)..(404): unsure at all n locations
agcttgagtatagagacttctcaagctatttatcttctctctcagagagactctctcattggattgataggaatgaaggctcctacccttatttatactactctacctccacaatgaatggtggagattacttgtatcatanggtggagattaattctctagaatgttgcacacattctatgagtctttacactcttctactcttttccatatccttccataaggttccacacatctctagaatattctagaggtttccacattcttccacaagcttctagagagttctacactactctagagttctctaggacgttctaaaaaattctatactnttccagagatgtctagaattttctagaacttctccaattaagaaaggattccaacaattgtaatgtatc

SEQ ID NO: 299559 - DNA, 291 bp, Glycine max
tgagcttagtcatgagaggtgtgcgtgtacctaatctctagagtctcattgaagatgcctcagagatgcttatcaaggaattactctcaacatagcttctcaatgagaccgcctaggctatgaataaaagcatgtgtagcacttgtgtaactttgatgaatgagagtcttgtgatacacaactcatagctcgacttctctcctttggtcttccttccattactagctcccccctctctctatgtctgactttttcttttcctccatatgaacatcctcttcaagcttctta

SEQ ID NO: 299560 - DNA, 385 bp, Glycine max
tgcttatctcttggagtatataactcattatgataagctgaacagtgtgaaatctattcaaacaagaattaatgatacttgcattgacattataaaggtcatttatactgtcatctgatcacacatcgtcatatatgataactttgttgacttttgcaataactcatctttgaaagttataatgatgatttctgatttatcaacaatgtaaaagcttttacactaactgtacatgcctattgagttcttattaaaaagagcttatagaatattcatcatctatgagcattattaagttccatgtaagctctatcaaatgcctcctaaatccttcttacaaattgaagcttcgaacaaaatggattgagactaacaataattatct

SEQ ID NO: 299561 - DNA, 180 bp, Glycine max
cctgacttactgacagacacgcgtaaaaattcgtttccaaaggcgtatagacgacagcccccaaaggcacatcacaatctataaggagatcgacataccctaccatagatcatataactatcagctagctctttccgatcctcccagggggaacacatattacatgcccaaaactcaacc

SEQ ID NO: 299562 - DNA, 394 bp, Glycine max
  unsure (1)..(394): unsure at all n locations
tttcttgcttctatgcggtggagggtcttggctaccccgaaatgaccaccaagtggtgtggcatggaactccgataagagggatgggataaatgggttggccggattcaaccatattcaatcattgaagagtagatagccattatgaacgcgatactgagggtagctagaaggatcatgttgaaccttgtcccgtaacgtctgaatatcaaagtcgtgctcgagtgtttgttggatttcgcgcagaaagtcaaactgatgaactgaaagcacgagtagctggccggcgagagagtngcatccgcacaacatttgtggcacctcgcttgtattgtatggtgtaattaagcctagtaacttggaaagatagtagtgctgctcccgggtctaaatca

SEQ ID NO: 299563 - DNA, 302 bp, Glycine max
  unsure (1)..(302): unsure at all n locations
ctcagctgctcgctacgagacaaaccctagaatttgtgatcagatatttcgcgcttagcgcacaaccacttacactcgctcagcgagacatgctctntagagcacgccttcgtaagctgagaagcctaagagcctttaataacactaagaatagagggagttctttatcttagtatttaagccttgttgcttatgaagggctgaacacttcattgttgatgacgtctctactgagcactcttaatgtaaaactcctaactatctatttaaatgtacttgctagtcgttcattggctctatct

SEQ ID NO: 299564 - DNA, 386 bp, Glycine max
tttcttgtgtatccaataccctgatgaggatgtcccatatgttcttaaaactggactgatccatttgcttccaaagtttcatggtcttgcaagtgaagacccacacaagcatctgaaagaattccatattgtttgctccaccatgaaaccaccagatgtccaagaggatcacatatttctgaaggcctttcctcattctttagagggagtggcaaaggactggctatattaccttgctccaaagtccatcacgagttgggatgacctcaagagagtattcttataaaacattttccctgcttccaggaccacgaccatctgaaaagatattttaggcattacaaaactcagtggagagagcctatatgaatattgtgagagattta

SEQ ID NO: 299565 - DNA, 297 bp, Glycine max
  unsure (1)..(297): unsure at all n locations
tgatactcagctgcttctccaaagcacagccttctggatgattgatctggaatgtctaagtgggccagatcgctatttgcaccccctatttactaaatgcaccccccttctattattttctttgtaattctttttccgtaacgctacgagactgtgcgaattttgttgcgatacttattgtccttgcgcagggttacgaatccttacggattatgtatttactcttttttagctttcgaagaagttactgaaactcacggattgtgcaanaacacctcttttcaatttcccgcacat

SEQ ID NO: 299566 - DNA, 317 bp, Glycine max
tttcttattgtttataaagtactggatctattggtctagttaacttcttaccaatcatatttgttcggctaagattcttctagatttaactctgatccattaaatgttgatttttgtgcacaaattagagatgatgttgattgtttaaggagttctccaagtaaccaagttaaaatggttctctttggattgcaatcttagaagtaatgttacattggttggaatacagtgcttcaaaatttatagatagccttcattttttagttaattgagaatgcgacatcctcttggattcatattggtgttcctgtatttgc

SEQ ID NO: 299567 - DNA, 454 bp, Glycine max
  unsure (1)..(454): unsure at all n locations
gcgcttatcgtcctctctatctcacgttgctatccctttcttcttgctcatcattgaagctccatcaaagctacaacctttgcacaccatttctgctccaaaatcgcagaaggaagccattttcggagtcgagaagagcacctctccattgtgggacctcacatttcacgtttgggtagacttcttctcacataaattttcgtgggtattgcgttttgggagatatgatgggtagttntactaggtttatgcctcatgatagttatttgtgaagaaatttgatgaaagcatgttgaacttgtcatgtttggtatgagtcaagcttacccattctgttgtagggttnttatgatgatgctcgtatgctgaaatggctgatggaaaaatgataaagatgaacggtagaattaacctangggttaaaagtgagaatgtagtgatatgagtggaaaag

SEQ ID NO: 299568 - DNA, 246 bp, Glycine max
  unsure (1)..(246): unsure at all n locations
tattcatgctatatccaagatcaaataacccttgagggaaaaaatggttaccaattatctaaatgacaatatgagtatcaaagtccacattctgtgtgccttaatttgtatgtctgggttaataatttttcaaggagttttattcttgtaaaactatgtcaattcttactgaagatgctgaagctctattattattcaaagtacaagttctgctagctaagctcnaataacatatctagagtctca

SEQ ID NO: 299569 - DNA, 364 bp, Glycine max
  unsure (1)..(364): unsure at all n locations
agctntattcacactgaagaggacaaaagagactttgttgatcaaattgaggttggtgaattggaaaattcagttgcggaggatattcatgagtcaaataaaaggaaaactcctttcgaaggtttgtcttctccatcctaccaaatttgacctggtgtttcttagaagttaaaattagcaatttatatttattntgttattcaatattctgattggaatttccaaatgatttttccaattacagtattattgcctgatcctttcttgaatagttgttgcacactagcttctttgcctatnagaatttattgatgtcataaacaacatgtattctangtatgtttgaataatcttctccgtaaac

SEQ ID NO: 299570 - DNA, 479 bp, Glycine max
acgcacaccctgagctgcaccacgtgtgggcgtaaacgcctcccccccccccagagcatgaccatcgaaaaccccttaagaccgcccgacagagcgcagcgtaacgagcacactccacgattagactgctgaccaagcaccacgggagcaaccaagcatcgacaccccaccaacccgagacaataacgacctaaaaacgcagggacaaagtcagaaaaaaatggcaaacccgcgtggacagaaggcgcaacacctggggggaagaagagggtaaacacagccgagcaaccgacggacaaacgcgacagagaaccgcgagaacagccgagcgattcgcgggcgagacgaagggagcaagtacgcagaggaaaccggcgaccaaaggacgaaaacaaggggcgccacacgcggagctcactaaagacaaaaggcgagaacgacggggaaagaaaggggacagacagactcacacaccaacg

SEQ ID NO: 299571 - DNA, 349 bp, Glycine max
  unsure (1)..(349): unsure at all n locations
naagcttatgatggtgttcaatatttatgggggngattgtacatcaaaaaaagatgagaaaaatgaaaacattntttttgtaatgaaaaatgaaaagattaacaccaaaaagaagaaggtgttggagacaccgatattaatagctgcaaagaacggtgtgacagaaatggtagagaaaatcattgactcgttcccagtagctgttcatgatatggatgccaagaaaaaaaatatagtgctattggcagtagagaacagacaaacttacttatataacttcttgctcaacaagaaaaatctaaaggaaagtaatatattcggaaaagtggataacaagggaaacagtgca

SEQ ID NO: 299572 - DNA, 417 bp, Glycine max
  unsure (1)..(417): unsure at all n locations
ctagattcatcacttaccccaagcaatacacactgcaagctcttgtcatccagctntgttcttttctgatcaggtacatggacatgagttangcacccaaatactttaaagtaatctactntaggtttgattccactccacatctcttctggagttttatctttcactgtcaatgtgggactcctgtngagaacatgaactgtccattttgcagcttctggccaaaaagccttaagtacttgtttgtcacaaagcatgcaccggaccatattcataatggttcgattttacacttcgctacgccgttttgttgtggagtgtaagatgtngtgagttgcctgcttatgccatgaattntacaaaatcattaactcatttgaggtgaatcaccccccctatctgtgcgtaacaacatat

SEQ ID NO: 299573 - DNA, 184 bp, Glycine max
  unsure (1)..(184): unsure at all n locations
tgcaccaatagataacatctttngatgaggatnagcacttncagactgtgganctccattatntntcatatgactttaacaaattgttaagtcataatacatttatgtcttaaagatgaattangactcctaattantttgattagatgaaaataaatataaatggtaaaaagtgtgtctaata

SEQ ID NO: 299574 - DNA, 443 bp, Glycine max
  unsure (1)..(443): unsure at all n locations
cttctacattcaacctacagtcttctcanatgtttatgtacatctttctagttgcattntcaccttatcagaagagactctgnaaagttaaaatacaactcataatgctttcaattgaatntgtaacaatcaccaggatggcatgctgattgcanaggatgagatctttggtccagtcaatccatattannaatcaagtaagaaaacaactagtgttagttaattactttgcagagaatggtattatactaccatacatgtgttgtgctttgtgcattaatttttgtgttgatgactccagggaccttggtgaggtagttcatagagcgaacaacacacgttactggcttgcggcaggaagtgtcacaaagaacatggacactgcaaacactttgacgcgggcactgagagttggaacagtttggataaactgctttgacaca

SEQ ID NO: 299575 - DNA, 403 bp, Glycine max
  unsure (1)..(403): unsure at all n locations
agctngtgattgttaaatatatatataaaaagaaaaattccttgaggttttgcacttgcacgtttgagaagaaaactcactcgaccaggagcttgtggaaaatgcccaaagacaattgtgataatagggtacatctgatgttagtcactcatgcagactccttatgattccttatgaatccaaaggtggcctttcttgtacaaattctttcgggatcaacccatgacatcaagttttagcaagatcaactgacccatggcatgactctatgatattaaatcaggaaagtttcacttggtcacataccaaagtgtgacaatccattgccatccttcaatggggtgcatgatcgatcccaaagccatatattttcttgttgtgcagaaataatcaaagctttaaa

SEQ ID NO: 299576 - DNA, 412 bp, Glycine max
  unsure (1)..(412): unsure at all n locations
tgagatgaggaagtgttgaagagtgaaacttcctgctnttattgttgaccacagagtggtacctggagatatgtcgcgggggtcaggagaccttgnggacgtcaggtggngtgctattgcccanaaccaagcttgaccaatcccaacccaacccgggcatagtcggtcagtgagaacctgtgatgtacctaagcaggcgagctcctngcagtcaacagataanaggantacaagaccacaaagcaaggaggcttgtggtggctggccagctgtgaattttgtgtaatatgtggattgtggtctctgggtaatcgataccanaggtgagtaatcgattacaaggcttanaatngaggacaggaggctaagatggtctctggtaatcgattaccaaggggtgtaatcgattacc

SEQ ID NO: 299577 - DNA, 366 bp, Glycine max
  unsure (1)..(366): unsure at all n locations
agcttctttgagaaatcttctntgagaagctagagcttagctacacacacncctctaataactaagctcacctccttgagaaagctccttgagaagattcctaaagaagctagagcttaggtacacacaccccctataatagctaagctcacccccatgccaaaattcatgaaaatataaaaaaaaaagctctattacaaagactactcaaaatttcctgaaatacaagggctaaaccctatactacttgaatggccaaaatacaaggcccanaagaggaaaaaccaattcttacatttacaaagaagaatggatccaaccttgacccatgggctaaaaaatctaccctagggtcatgagaaccct

SEQ ID NO: 299578 - DNA, 488 bp, Glycine max
  unsure (1)..(488): unsure at all n locations
ntgaattccagtccaaactcacttcacaaaatctaatttcaggcttatataggtggccttattcgtgctcttgcgcttagtgcacgaatggagcgcttagcgcacgttagtggattttggcttagcgcgcctttctcgcttaatggatgaactgaagcagtgcgcttagagagatgaagcagtgcgcttagcgaacctgtacaactcatcttcttctggattcttcctcgcgcttagcccaggagtgttgcgcttagcggatgctcgctaagccaacagattggcttagcaagaaggtgaaaacaacctttttccaaagctntcctaattaacctanaattgagagaaaatgattattaaacacaaaanatgaaaatactaagtatttattacctatacttaacataaaatacttataacattacaaaataaccataaattaagagagtntgatgcaatntatancaagtttatacacaaaagttagt

SEQ ID NO: 299579 - DNA, 370 bp, Glycine max
agcttcagtttagtgactatcttcaagtgtacatgaatcctaaataacatctacttaaaagtaataaactctttaaaccagaaaatcccatgacacaaccaagcagccgtttgtgggagatgaggtttgtctcgttgatatggtccttgcggccatttgcacatgaataaataaaaccacagcgctgcgaacccttcacaaacggcggcaacagagtgatttgcggtgccaattttggggtgttagggtggagctgtgccttttggtgtgggagggtggcggtagggtgggtgttatgaattttcaataaatcttataaaatatcaaatgagcaccataacacattacattacgttagatcatcaagaga

SEQ ID NO: 299580 - DNA, 76 bp, Glycine max
tgaactccttattcctttgagcataagcggcaagcttcattcaatgtaaagaggggctttccactccttgaaccct

SEQ ID NO: 299581 - DNA, 391 bp, Glycine max
  unsure (1)..(391): unsure at all n locations
tttctnatttttctcctccttgatnctggccatctcttagacttcgtcctttatctcttattccaccctcatgttttcttgttctgcgattcttgaaaaatacctcattgttgatggttccncgactttgacggngatcatgatgtctatgccatatgtaaggcggaaagtagtttcattggttgttgtctaaggtgaataatgataagcccaaagtatgctanggagttcctccttccataaacccctagacttgttaagtcttgtgcgcangataaccttgtttgctacctctgcctgattgttagtctggggtgttcaacagaagtcacgaagtgcttgatcacctacctcatcaagaattcttcataagcttaagctttgaattgag

SEQ ID NO: 299582 - DNA, 329 bp, Glycine max
  unsure (1)..(329): unsure at all n locations
acctatagaaactcaagcttggtttgaggtacttacccgttgaagactcattattgatgaagatttactgacgaacgtcgaagaacggtcaaaaaccttcgcgaaatcacttacggaaacgtttcngatgcgcctcggctcgaattctcttcacggaaacaattttactaagcacattcgatagagagagaagtgcctaaggggctgaacccctattctacatcacttgtccccctagtcatagaaaattgtgggagaagcttgccacccagctctccctggcgagcagggttgtttcctccataagcaacagccttctggaggaatct

SEQ ID NO: 299583 - DNA, 393 bp, Glycine max
  unsure (1)..(393): unsure at all n locations
ttcttcaatgtttgcaaatttccatgatgccagacttttcttctgtctcgttcacttttgtgcaataagagtacaagaccatgtgttccctatgttcatttcgtcgccttttggacactgtctcttctagaagacaacctaatggatntgctcatttccaagcttgatagcatagcctatctctcatcaccaanagttttttaattacttgctctagcttcgtagctaggtaggaagttntagttaagatcatagcgtacagcttgttgtacactcttatccctgcacaccacgcatatataaatagttaaactgtcttattttgtgatcattaatcttatgagattctgtacataagtttcaatatgcatatatccatcactattggaagaa

SEQ ID NO: 299584 - DNA, 303 bp, Glycine max
  unsure (1)..(303): unsure at all n locations
nttagttagaaaatagcatagtatgctntaatctaccattatttctatatattncagactgttgtataatgttcgaagataaatttcagagagccctgagttaccaaaatataagtgattttttttataaaatagttaactctattcttaccagtctgtccccacagtgctaagatagcatttgctgcttgtgacattttaatttgattcaaaacatcttgtactgtttcaggaattcttaacttanactaaacactggctaaatctggatattgtttttgtagtcacatctacaaacacatg

SEQ ID NO: 299585 - DNA, 402 bp, Glycine max
  unsure (1)..(402): unsure at all n locations
tgctntngtttaaaccccaattngaaatttcggagtgtcctaggtcgaaggttggaagttgaggagattaggcacggttccaatcagagattaaaatacttaccctgtgcggtacttgttggagaagagggataaaagaaacaggccaagaagatgaaggatagcacggatagggaaacaaatgggattctatagtggaatattntatccacggatattaaactctattagttcaccttctgtatgaacatcttttttaatagtcctcttcagagttttgacactctataaactctaattaaattggttagattttttaagtntatcacatacatactcaattagtcaacaagttaaaaaagtagaatatatatatatatatatatatatatatatatatat

SEQ ID NO: 299586 - DNA, 809 bp, Glycine max
  unsure (1)..(809): unsure at all n locations
ggctcgacacacagacancgtngagcagcagcccgagtatttgcanatttgcgngtcggcnctancantatcanacnncnnnnccccccccncnnccccccagcaacgagcgncnctattagtatnagcccatgcgnaagtcanncangacancnnaannanacnacgagacangnncangcagaccgacgcgacgcccgnacgacggngaangacgacacggacacgangacanacnccacgcgctagtataagtgagcacagtactgcgcgtcgatcaacgacatcngcgaggggagcgagacagacgaaggcggcgacacacatacncatcgcacgagacacagaagagtancgcgacggcatctcgccagacaagagcatcacagacagnggaggacaacgcgngcgaagcgacacaagactgcacagatgacacagacaagagacaacacgccacgacacgacggagcgacgaacaagataggaaactcgccacacgcagcggaacaacacacgagagagcggaatcgtgacggaggaggcgcgaagaaacacgcccacgccatctacgaaagggacgcgangaacaggcaacgagagacgaacgacacgaaggcaggcgaacgagcaatgcacgaccgggcaaaacagaacgaacgacagaaccgcgcacaacggaacatcgcgcaacgcgacaatcggcagcgcgacaacaacacgaacaaacacaagcgcaagcgatggaacaagagagggagacccgggcagcaggcggaagancaggccagaccagacaaacctatacg

SEQ ID NO: 299587 - DNA, 401 bp, Glycine max
  unsure (1)..(401): unsure at all n locations
ttgcttatattatctctaaaaataactctatggatgagatatttagaagtaatgatgatgatgatgtatatataactctgttattggacccaacaattgtgaagcatgtgcaatgacaaaattggcagaccatgtgtggaacccaccattagtaaaacaaattaactaacaagataggtctatgattaatcctaagaagctcttttgattatgcctttatntgcatgacatgagaagttggcaaaagtatattgaacataaaagttggccgagaagcttgacttatctgtcacaagcatgtcacatttctttgagtgcagtgcactccctacgcctgctggtggtggagaaagacctgcccctgtcgtgatcacaaattcacgaccaccatgctcacacat

SEQ ID NO: 299588 - DNA, 263 bp, Glycine max
  unsure (1)..(263): unsure at all n locations
acaaatcgatgggccatctggttgctagcttatatngctattaccacaagttggcctctggttggatcggctctatatattgtgtgcgcgaaaaagattaaggatatcctaccaaatggactagtcacaaaataatttcttgattgctgatattaatggtgtatttgtctgtgcagatgtatgagaatatacacacatcatttcttttgccctgcaatcgagggaaatctgcctttctaggcttgtggagaacttaattctca

SEQ ID NO: 299589 - DNA, 280 bp, Glycine max
tcccatggtgcatacgaatgtgtgatggattctgtggaaagtcacggtttcagaggtgtggatgagagttttggaaactgcttctcctgttgaatctgtcactcatttgtaagttttttgtttttcgcaatttaattactctgccctttggattttcaaatttgtggacgtgtgttggaactcgcgtttgtctctggaagaattgttctcacaatccaacgtcgcgtgaatgtctgttctctcattttattagtgcatcttacgtgttatgcctgtaatg

SEQ ID NO: 299590 - DNA, 396 bp, Glycine max
ttattataacgactaataactaaacttgttatagatatttacttattttggatgtgtaacggggtggagtactggctgtcatcgtcacaagggaaatggacaaaatggcaaaaaatattttataataaagctgtcattataagggtttatataattcgagaaataaattgtctctctctttaagatcgatctatgatactatgaaggatgaaaacttcatctttgtgaaagacacgagatattatcgctaaaatacttattctaaactagtagaagaatgtttataataaaaatgttcggtaagaatttcactttgataatatgtcagagaaaatatttattttaaaattctccagatatggtctattttgcgcaagtttcttatcatggtaaaat

SEQ ID NO: 299591 - DNA, 359 bp, Glycine max
  unsure (1)..(359): unsure at all n locations
agcttgtgctaatgtgataaataaaaataactatnttcaaaatgaccacttttgaacagtaatttgtaattntgcatcaagttggtcaatcagcccttcctttagaacgtgttttgttttaacgtgtttgtactttgcgatgaagcagttgaacgtgactgtaacaaattgttgtgattctttntgtttatgtaataaaggataaaattgtttgattcacaccataaacccaacacccacatattctgttatgtgttgtgtctgctgctgctcctagaggcttcacccttcaccaaactcttctcttttctcttcaatcacgcacgcacttctcactcattttccagttcactttctga

SEQ ID NO: 299592 - DNA, 124 bp, Glycine max
tattctaaatagctctcgatagcattatgaatttaggatgctgaatctagttgactgaaatataacctattgagactgatgctttcaatatttaattgtgattttttattataattcataatga

SEQ ID NO: 299593 - DNA, 369 bp, Glycine max
  unsure (1)..(369): unsure at all n locations
agctntctatatattcaaatggtcagagcttttcacacggaggaccgattcatgcgcgtaatatatcgagatgttcgtaactgaacaacagaagctctcgagaaattcaaatggtcataacttttcactcggatgtccaattcatgcgcatcacatatctagatgctcgaaattcatcaaccgaagctctatagaaatgcanatggtcataagttttcactcggatgtcacattcaggcgcatcacatatcgagacgctcagaattgaacaatggatgctctcgagatattcaaatggtcataacttttcactcgcatgtgtccaattcaggggcatcacatatcgagacgctcgatagagaacaacgg

SEQ ID NO: 299594 - DNA, 668 bp, Glycine max
  unsure (1)..(668): unsure at all n locations
gccgagagggcacacggtcaagacaagacaacgcnncacccccgcgagactgaacntggtgagccntggaaaccacacacacaaaccaagctccgcaacgagcaaaaagcagcgagataatcctaggacatattactaggcagctacactgacgccatcgacgggcgatggcggcagacaagtaagcagcgctcttgacgcacaagagaggcgacactagcgaggagatacgcatgtcgcctagtgatcgcacgtattgacgatagataatatatncgcgcgaggcgtccccacgtcggtagcgacggacaggcgcgcactatcgacgcgcgcgcacgacgacggaacgatctgcgacttacgcgtgagtgacgacactacgagacacaacgttcacgcgcggcngaatctcgactgcgacgtntagagaggcaagatcgacaatatcctctgccctcgagtgagacgactgacactcgactatctacacacgacgcagacattacatgcgaatataccgactacaccgtcacatgtgctatgagacgcacgagcagcgagatgacagccacggcgacgccactaatactacacaancgacactgctgcgcgcgaacacaacacaagtcacacgaccgtgcgctggcgaacaaggaacggcactcgcc

SEQ ID NO: 299595 - DNA, 354 bp, Glycine max
  unsure (1)..(354): unsure at all n locations
agctttcaatatcaacatttccttttccctttactgagatgaaatcaccatttccaatttttactttggaaacaatggttttgtcaagttttttaaagaggttcaggttattggtcatatggtttgtgcagccgctgtttattaaccatgaatcactggaactattgcttgtgacaaagcatgttgcaacaaagagttgctcatcttctcattcctccgcaaccacctttgcttcctctgatttggacttgcatattcgctctacatgtcccatattgctacactntctgcacttgacatctggcctccaccaacattntctttcaggatgatttgtctttttgcaatgcggac

SEQ ID NO: 299596 - DNA, 451 bp, Glycine max
  unsure (1)..(451): unsure at all n locations
aggtgtnttcatccnctgcaatagtcctgaattgtgaaatttatttggaanatcctactttgaatatgtacaaacgcattggtgagattgtagatntaagcataactagacatccgaagtgatcttatgggaatggaatggactcaattgcataagtagagaatntacaatgaattttgatggngatggatttttcaagttatttggttnttaagctgacaagtatgtcaacttttgnggcattaatttgtagttggtgtaaaaacactagaaaaatcaatgaggtgtcttaagacattgagaacatttctttanattctttgtccctaattctaagttttctatttatgggattcatcctacccaaacaaccaaatttgaatttatancaattatattttctaaaatgtgtttagtaagggttttggtttcgttaagagttaatgaactg

SEQ ID NO: 299597 - DNA, 394 bp, Glycine max
  unsure (1)..(394): unsure at all n locations
accatcacatgtgggactaaggggcgggccggcgattgtgcacaacaaggttttcacattcacaatgggcgcataaacccaacaatcccttggtgccaccttcaactgagctcaacgtactccacgtaagccatatcctcgtttctctcaacaccgggtccccatcaatcctctcaagctttcacaacatccaagcagaacaacattcaaacagcacaagctatcacagcccagcaaaacagagcaaagggaggaaaactcttgctcaacaccaaccaaaatcacagctttttctcgcttaaaagaccccagaacaattccttcgatccaaatcgttaaccggttgatcgactcgaaaattntaatggaagtctctagtacataagcctacatn

SEQ ID NO: 299598 - DNA, 475 bp, Glycine max
  unsure (1)..(475): unsure at all n locations
ntgactcggatatccgattgaggcccaatatatatcatcgccctttatatatagaaatgtactgaccacgcaaattcggacagccataacgttagactcggattcccgattgaagctcataatatatggagatggtcttaggataaaaatgaagcccatcgcanatacaaacgaccataacttttccaccggatctccgaataagccaagtaacctatcgcgatgctcaaaatttatcatggaagactcgggtgaattccgacgggctaaactttttactcggatgtccaattgaggcccataatatatcatcgccctcgaatatagaaatggactgaccacgcanattcggacagccataacgtttgactcggattcctgattgaagctcataatatatggagatgctcttangataaaaatgaagctcatcgcanatacaaacgaccataacttttccaccggatctccgaat

SEQ ID NO: 299599 - DNA, 237 bp, Glycine max
  unsure (1)..(237): unsure at all n locations
agcttctactttatgtgcangggcggctttcctcactttcttgtctncaacgcgagctctgaccactgtccctcctttctgcggtgcttcttttcatgtccgcttgagtgggcttataacctaaaccatatttcccacgatttccttgggtttttatcaggctaattatgccgccattgtcttttgctaaacccatcccgggttcataaccgttccccaacataactcgggccatca

SEQ ID NO: 299600 - DNA, 480 bp, Glycine max
  unsure (1)..(480): unsure at all n locations
tcaagaaaaagatggcctcagcanattccttatttccagaagggaattctatcaatagacctccaatctttaatggagagggttaccactactggaaaacccgaatgcaaatttttattgaggcaatagatctaaatatctgggaagccatagaaatagggccttatatacccaccacagtagaaagagtttcaatagatggtagttcatcaagtgaaagcataactatagaaaaacctagagatagatggtctgaagaggatagaanacgagtacaatacaacttanaagccaaaaacataataacatctgccctgggaatggatgaatatttcagggtttcaaattgtaagagtgctaaggaaatgtgggacactcttcgattaacacatgaaggaactacagatgttaaaagatctaggataaatgcactaactcatgagtatgaattatntagaatgaatgcgaatgaaaatattc

SEQ ID NO: 299601 - DNA, 309 bp, Glycine max
  unsure (1)..(309): unsure at all n locations
agcttcatcatttcatttcgagggtctcgatatattacgggactcaatcggacatccgagaaaaagttattgtcatttgtatttgctcagagcatcaacattcaatttcgagcgtgtcgatatattacgggactcaatcagacatccgagtaaaaagttattgtcgtttgaatttgctcagagcttccgtattcaatttcgagcgtctcgaaatattacatgactcaatcagacatccgagtaaaaaattattggtcgttgaattttctcanagcttcaacattcaatttcgagggtctcgatatatta

SEQ ID NO: 299602 - DNA, 447 bp, Glycine max
  unsure (1)..(447): unsure at all n locations
ntgagggatttcanacgacaataactntntactcggatgtctgattgagtcccgtaatatatcgagacgctctaaattgaatgttgaagctctgaccaaattcaaacgacgataactttttactcggatgtctgattgagtcccgtaatacatcgagaccctcgaaattgattgttgaagctctcagcaaattcaaacgacaataacattttactcggatgtctgattgagtcccgtaatacatcgagacgctcaaaattgaatgttgaagctctcagcaaattcaaacgacaatagcttttttactcagatgtctgattgagtgccgtaatatatcgagacgctctanattgaatgttgaagctctgaccaaattcaaccgacgataaatttttactcggatgtcttattgagccccgaaatacatcgagacgctcgaaattgaat

SEQ ID NO: 299603 - DNA, 354 bp, Glycine max
  unsure (1)..(354): unsure at all n locations
agcttactatatttttttatagtttgcgctatctaaaaagactttntcanaagggttgttttggcttttataataaacaagccgagccgagctgagtcttacatagaccgagtaaaaggctcttgacaagctgttcggctcattntcatccctatttctaatgataataatgctcataaaaaaatatattattaaataatatcaaaatattcaaataaaaaatttagaataaaaaatgataaagggagaaaacataaacctacccgcaatcacgactgtctcaactcttcgacacctaactttattttctattntgctatttctagattaatcacaatgaataaatattaatta

SEQ ID NO: 299604 - DNA, 381 bp, Glycine max
  unsure (1)..(381): unsure at all n locations
ntgtntggagcttctatggagaatgaagaagaagaaagctacgtgagagagggagaaaaaaggcttctgaatttctttcttttggctgagtgaggagagagaacagttttttggttttaaactaaaaggtttttctctttttctattattttatttaagctatgccacatgtctccatttgagtggagcaaaaagggcccactttctcttttgattgtgacccatactcagccacaaaaagtgagaaaaaacctaacctttgaaacgctaaaatcttgcctcggtttgcgtgccatttctctggttccagttcctcgcgtttctctgcgtccgttggggccagttttcgaaagtaagcaatatatatatcaaaacgatcag

SEQ ID NO: 299605 - DNA, 380 bp, Glycine max
  unsure (1)..(380): unsure at all n locations
tgcttcattgcctaacaggccaacttacaacaggcaggtcccaagagactcagcataatgatgcatangcccaaagttgagtatggtgaaaagattgtatgacccaagtgaaggtgcaaaattgcaaaaaaagaatgaaaagctataccaaagcaagcccacaaagaaaagggaaggaagtggtaccttgaacnccagtgatgaatcctgggacatttgagggcaaatggtttccaagaaggaggtaatgatgagaatcttgaaactgaccaaatacaggctaaaggcccaagtggagaanggatgaaagcccagtggagaaggacaaagcccccgagtggagaaggatgaaggcctanagacagagacattatcaagac

SEQ ID NO: 299606 - DNA, 387 bp, Glycine max
  unsure (1)..(387): unsure at all n locations
tctagtccctcagataagtgtatattncgcagttatggtatgttgttaacaacacatatattgcacttagaattttccaagatgtctatattgaagtgtttaatggttatgtactgtcagcatacaagattttgcacttgtcaaccaattaagagtcatgtttggtgtgattttttgggtggttattttcaaagtcaacaaacttactatagaagatgtcttgtgcttggatgatagtgttaaagcactttacgataatgtcagagataatgtcagagcatatacatttgtattctatattgaatatctactttgctgactcgaaacatacaatctatatactcagtacttcgactagtggctgctaatataaacttttgtaaacaa

SEQ ID NO: 299607 - DNA, 295 bp, Glycine max
  unsure (1)..(295): unsure at all n locations
agcttggatgtgacttanagcaaanaagaaggttcctgctttccgtggacaaatggattgcaaaccccgatggtttcggtggtaaaatttattaaaaaacttccatttttgcaggagaaggtgaatggtgatggggggtttgtacgggttttttaatcattgtgcgaaccttggagatgctggtagattgtagaatgtactgaaatgtggctacggaccaaaattatcagaacagaacacaacagtctttgtttttgttttaatttattcatgtagagaagtttattatgggagt

SEQ ID NO: 299608 - DNA, 332 bp, Glycine max
  unsure (1)..(332): unsure at all n locations
ctttatatcatgctgttcttattacagtcatagagtccctttcatagcttatanttttgatcgttagatatatacggaatttgggggtcgatggattaaataatttttgcctataaaaaaattgtgtcacactacagcttagccatgttcactaccctaaacaaagtcaatacttgtttagatcaatgtatgaacgtgtataacgcatacatgtgcatgcatgacccacaagtgcataactgaagcccacctttgtccttcattgccaccaacgaagtcaagtcaccaaactttactttacttcaaccacaagggtgtaattcttcggtatt

SEQ ID NO: 299609 - DNA, 355 bp, Glycine max
  unsure (1)..(355): unsure at all n locations
tcgattcattctatgtgcccgtagtggtccacattgtgtttcgtgcatttatattctcgttttggttactttgtataccccctgttgacgtgcttaagccattntacttaagtcatttctcgcttaacttaaaaataaaataaatttccaccgaacgtttgaattgtattatccattaacttcggttaaaataaattccgaccgttcggtcgtgccgtaaccacgttggaaatcaaaaagaggtaaaaaataatacaataatcaaaaagacatcttttagtaaaataaagcgganaatcaagtggacgttttctctttgggatntctcattcttaatcgaattgattaataacta

SEQ ID NO: 299610 - DNA, 386 bp, Glycine max
agcccggccaccgcgagctgaacaacagaccaccccccccgagaatgagctgaaacgccaaaacccccgaagagagccacactcagaccagcgttaatccacacccacgcccggaagggaaaacacaacgcacaacagaacgcacaccgccgaaaaggaaaacaacgggagaaaagcgcacacgaccggatagaaggaagcaggcgaacagcgaacgacccccacaaacggcgacggacgaaacacacgccaaaaacacgccaaagcagcagcggagggcggacaaggacggacgcacagcaaaggggaccacacccgacaacaagctcgaagggcggcaaaaggcgcgcaccgcgaacaccgagcccgaaagcagcaactacacg

SEQ ID NO: 299611 - DNA, 329 bp, Glycine max
  unsure (1)..(329): unsure at all n locations
ttgcttaattatatgtggactaaaccggtccattggaccatgtgtattttgcctatcctagacaacctatataactttttttttatttctgcagcgcatgcaaaacgaactcactggtctggtttttctattcaactaaacaccttatatatactttattttaattcactctntttatttccatttatcatattcatcttctcacaaccaaacacagattgccgtatataaatcatgtaaataattttggaaaaaggatgcatgaatctatgagaatgaaaatgaaaacatggattcgatatncacaaatatgatgaaatggtggtgca

SEQ ID NO: 299612 - DNA, 565 bp, Glycine max
  unsure (1)..(565): unsure at all n locations
cgtcccactacattccacacgccattccaatatctgcgaatcttcttcntcnnntaccgcccaaccagagcgcgttgcaccgtgtttgatccctttctataactgacctataaatctcagcttgcgctagggcaagtgcatctgatgatggttgcctatgtatttgaagacactctctagacttcaagccattgacaccattggctagagaatggtgattaaatgggaggtcaagatatctagcgaaagattacgatcattgactgagagtggtctgcatgatcagtatttctctgatgtatctttgccaggattatcaagaactctatttttcgtgctgtattaatggaacgatatatctgtgttactcctggaattcgaacacctagtttcctttttttgattgtgaaccatacataatccaaataaggatgctttgtttatttgcaaactaagcaaatatctaaatatattcttttgacaactgcgcggtaataagacatcaaaaagattttctgcttactccactgctgaactcactacttttctctgtttattgatgctc

SEQ ID NO: 299613 - DNA, 377 bp, Glycine max
  unsure (1)..(377): unsure at all n locations
agcttattgtattatgtaacaatgatgtcaggttttgagaaactaaggtgttaaaagataacaaggaaaatgatagaaaacaggtaactgaacaacttgtgcgattgtgcgattgttctgacagttgatacattatcatcatggtggattgtgactntgtgagttgtgggattccttctatatttaacatctttgaaacataaagcagccactggatgtggatgttgaatcgtgttatctctgcatcacgaattatgttgcgtccttgttgtatcgttgcttttggcattgaatttcaagagtatgattataaatgtccagttcttaatcttcccggcaattaaagcaatgctagcataagttttttaaaagatata

SEQ ID NO: 299614 - DNA, 456 bp, Glycine max
  unsure (1)..(456): unsure at all n locations
ctgaatntactaggtttaaanatataaagataagagggaaaaaatatcaaaaatactcacaatacttgtaatctttccaatgcaaggaggtgcatctaaaatactataatttggtttgccgctatatccaacaatcttcaagttgggcttaagggatagatagccaacatggattgaaccttgtctgtagcacaggaattaagaaaatcatttgcttttgactgtatggatagtgactcgtgtattgacttcctttccaaaatctttgtcgtcctcttaaggattntaatttgctgttttagttaatggcttactgctatagggattcaattcccaagcattagnttntgctnttgtttttcttttcttcttataatagaaaaaactaanaaaggcaaaattaattgagttgggaatggatctttngcaatatttttatcactatatggaatcata

SEQ ID NO: 299615 - DNA, 369 bp, Glycine max
  unsure (1)..(369): unsure at all n locations
agctngttcttcttctgngtaactacaacgatcttggtcttcttcttcttcacgacagtgataccttgccaccttacctaggtacaggtttcacgactcttttgttgttttaactacaacggtcttcgtattgtttgtttgtttggggaagtcgtgctcattgcaacaatagttgtttgtttgtgttgcaaggagttggtttgtggaactcatgctcgctgcaaggaattggtgtgtggaactcgtggtgattgctannggctgttggggtgctgactatgcaaaccgttcggggtggtcactcgtgctggcaaggtgtcattttgagtgagggtaattcaaatgttntgtgtcctttgaatgcttaat

SEQ ID NO: 299616 - DNA, 475 bp, Glycine max
  unsure (1)..(475): unsure at all n locations
tgacnccctgcaanacgtgactcgatgctcagcgaccttaaagcacaactttgctggctcaactccgagttcttagattataaagatatccttgtaccactacagcttggtatcatatcaggacaataagccttctgaaatcgagacaagagagtgatcgataccgctgctgacaagtgtaaactacaccttgaccgtgaatactataccagaccctatcctaagctagttactaagagattatatagagtattgcgcatacacagtgcatgtgagatattatcactactcatacactcaattcaatcgatctatttgtctattcacgagaactcataaattctcttctctatactagaatctcagcgagatctcctcataatgtgcacctacaccgagaagcaaacagtgcatcaattactattcatcagctatcagtgctattttctggtctctgagtcctaagactaattct

SEQ ID NO: 299617 - DNA, 382 bp, Glycine max
  unsure (1)..(382): unsure at all n locations
agcttgtttggttctcctttgccaatgtcaaatctgtaacctggtggaagccacagaacccaatgttttcttttgtcattctacttatgtagtagaatatagtataccagctccatttacaaagacttgaaaagactaaccattccttccatctttgaggtaaatngaccaccacattgttgcttcagttttgtcaaaatacttctctcatgatcatcattggcactcttgtcaaaaaggagccttcgagcaagcttcttcctacaagcaatcacgcaagaacatgtntgactattcttttgcaagcatcttacagtangaaaaaaggtaatgatgacactcaaattagccacagaaagcagaattcaatgatagactacca

SEQ ID NO: 299618 - DNA, 588 bp, Glycine max
  unsure (1)..(588): unsure at all n locations
ggggcaggcgtgtcagacgncgcgacgaggataangcgacgtggcnccnccaccccccccgacgagcaacttgaccccatggatagaacccantgggaanancacacacactcagaanacataacgatgcgccgcgggaccacgagacagcaaggcagaaggatagcctcgcggtacttgacaagccctctgcgagacgagcaacggcgctgaccgccatgggcaggaggaatcgccactgaaacgcgaggccaagaagctccacggccccagccgcatcactggctgacagtgagcgggccgaatcccctnccagcagaggagctgcgccgagatcccaggcgacagcacggtggcgcgacgaagaagggaaagaacagtcaggcctccaaggcaaacgcaaacccgggtaccccgtgccggctgaacccgcacggagcacacgaggatgctcgcttgacgcgacacgccccggagcacagaccggcgnccaatagacccagccgcccgcaggaggcagacacacaatcgggacacggcagaagaccagcggtcacacaaaaacggagacgaagagaccggcccgcc

SEQ ID NO: 299619 - DNA, 628 bp, Glycine max
  unsure (1)..(628): unsure at all n locations
ctctcagcgctctcatcgtacaanctccttatactacttactggnnttcttcaaattgttagatcgtatanngtatannnannnncaacgagtgtgcnttttgatgcctttgtaantccatggcaaatacaaactcggtactcgtggattctctacactcgacctgcacgcatgcacagcatgttccgattatttgtgtatatcatcacatgtaggtactattgaggatgtacgggcaaacggtacataatacaatatctcccatcatctatcaatatctacatatacaactccatccatccctctagttgtcccactcttcacactgaagcacacattacgtcacatcgtagccacttataccgcgatataactcatacacctgagccctattctatacctacataagctttccaccaatcattcaaggtaatttaatcatctcactcatctcaatattatctaaaaccaatcaactatagtgaacatagcacaatacattgaaccatacttactcctaaataataatcttctacaacatatatgaaaccctcataaacaattacgtatatcatacggttcatcattctaagaatttatatggatatccctaatcatatgccataat

SEQ ID NO: 299620 - DNA, 337 bp, Glycine max
agcttgttgaatgactggacatgatatatgtcagggtgttggttcggacagcagtccaggggtaaagggatgtcccacattatttccatgacacgcgcgcaacaatgatgattcagaaattctatgcaaaactggtcacacattcacctatgtggacactcaagcatcaagatttggtggtcacgcgacactatggctcaggattcattatttttcctatttaagtcaactcattgtttccaaaatatgctccttgatcaaatcatgcattcatctgagtccattttgggcgttctggaaaattatctcaacattcacccttcaggtgcgtacatat

SEQ ID NO: 299621 - DNA, 288 bp, Glycine max
acacctatacataatatcttgatcatcctctaaaactatgaacatatgcccaacacatcagaaactccaaatcctctataaatatttgatcattctcatacaaaaccaggttagattggacctctctcaggaaaaccttgggcaaaaactagggacaagcctccatgtctgctccttgcaaaaaacgaagactaacgccgaatctttgagctccttcctcttacaaagagtcacgactaccgctggatctttgatctccttccctagcaagatcaaagataccgctga

SEQ ID NO: 299622 - DNA, 299 bp, Glycine max
atgtggaagtcggcctatggatcactacatagattacagagacactaatcacgcataaaccctccatacgatgatgtcctaattcaactgaactcacttactacaacgaagcccatatgctcgattctctcaacactcggggccgaatccatcctgccaagctgtaccaacctccgcgtactacaacattcaaacagcacaaaataggcatccaggcataacaaggcaaaggcggaacactctgccctaaacaccaacctagatcacagcttttatgactgaaagacctcagtaacaat

SEQ ID NO: 299623 - DNA, 320 bp, Glycine max
tacatatgtactgacctagagccaacataacactataggcatgcatcattaccgttgacactgcagccgatgcgattactatatgctacatgctccatattgataccaatctacatggcacaccttcaatacgtacacttggcaaacacattcaactcttcaacctcatgctcacgcttctctttcacatcttcacctaatggcctacgatgaccttcatttgcatgtactgtctgactagcgtcccgtcttatcttcgacagcatcatgcatatcctcttcatgcgccaccgacgaagaaaactgtaattatctatcgc

SEQ ID NO: 299624 - DNA, 97 bp, Glycine max
agctgtttgatatattatgctcctgaatcggacctcctagttctaagtcatgaccatttaactctcctgatagcctccgcagatcaatcttgagcct

SEQ ID NO: 299625 - DNA, 412 bp, Glycine max
  unsure (1)..(412): unsure at all n locations
ctatagcaaactcaagctntcaagaaattcaaatggtcctaacttttaactcggaggtttgattgatgtttataatatatcgacacgctccaaattgaacaatggaagctcttgagcaattcaaatggtcataaatagtcactcggaggtccgattcatgcgcataatttatcaagacgctcgaaattgaacaacagaagctttcaagaaattcaaatggtcataacttttaagtcggatgtccgattcaggcacataatatatcgagactcacgaaattgaacaacggaagctctcgagaaattcaaatggtcaaaacttttaactcggatgtccgattcaagcacataatatatcgagacgcgcataattgaacaacggaagctctcgagaaattcaaatggtctaactt

SEQ ID NO: 299626 - DNA, 240 bp, Glycine max
accatagtcatggataggaaccggaagaagacgcccctaatatctgtcacctgtatcagatatcatggtcagaagcttttcgccaaactcagcaatatgaccaatgtatatgcggacatagcaaaatgctcccagatgctcaaagagtgagcatctggcgttgaatatttttctattcttcttagcacaattggaatctctatgagcctgatactatcaccttatctcataaaagatcct

SEQ ID NO: 299627 - DNA, 92 bp, Glycine max
  unsure (1)..(92): unsure at all n locations
actcgagcttgttgtagctctcatgtgatgcgagcatgctcatgaatgtgtgcatgctgttgttattacgactcagncgatcggacgtacga

SEQ ID NO: 299628 - DNA, 200 bp, Glycine max
agcttgacttgagtcatgaagagaatataaatatgtggccatgttatgaggtttatataatcatccttccaacgatcttatcaactatcaatcattctttggatcatcctatctttcaattcttttttaacatccattgtcaaacatttttcaatgaatctttcaatagtctttctatggaaattttcgattcatttctc

SEQ ID NO: 299629 - DNA, 259 bp, Glycine max
accctttattgctaattcatctcctagaactcaagtacaaagtctacctgacaatctttcattctactttacttggcataatacattacaggacactaaacccaagtaccttgtaccaacccaagctgcttgtacaacctatataccaggccccttgatcattctaaaaccaagatcccttatcgtactctacactacacaccatgcaagtcaagtaacaaacaactccccaactttgcacactcatcaggatgcatac

SEQ ID NO: 299630 - DNA, 574 bp, Glycine max
  unsure (1)..(574): unsure at all n locations
cacacccactcacgtcagtaactnagnaaaatatantaataatcgaatactcccaaaactcatgtncaggataattatntccacagggctacaggncnacgttgaaaccatgttagaaccnnctgcaannacgcgacacnanagaanactcaagctggcttgccttaagatgacaaagggatgttataaaaattctatccatacacactgagtcctcaagaaaggctgcagacgaccatgatggctttcgggtgtcaaagagctcacttagactctggctgaataaagggagactaaagtagtctcggacggtgcacatcgagtcttcgacaaaagggacagacgaccatctttgtctctgcgtgaatcacacttgattgcctcaggatgacgagggggagacctaaagacccccagtcgataaacaacgagtccacgaacaacagtgcacaccaccatgtcggtctctactcttcgacaaacatgattgcctccggatgaagacgcggacactaacgtaatctcgaacgaacaacatctacacctcaacaaataggcgcacaaaaccatgtcg

SEQ ID NO: 299631 - DNA, 379 bp, Glycine max
ctgcgcgcttcaatcttgttgtaaactgaataggccacaacggtcgagaccacacatctattcttagcttaattaaactgcagaatcaaatcataagcacaaccagttctgtataactatcaatcacaacggccatcaagtgataaccaactaataaacaagcgaaagtacatacgatgatgttcaacggattgtggaattgaaactcaagaattgaacaaccttcgacataatatcagtgcttattatagaaactgtggaggtatacgaatatgtgtgaaagaaaataacacttaatattaactagattaatgctgactgaatactatctaatgtcttgacaagtacttcgtgataatacctggaatatataccttca

SEQ ID NO: 299632 - DNA, 414 bp, Glycine max
  unsure (1)..(414): unsure at all n locations
tggggatttattntaggacaaaactcagatacagacattctttttcataggtatttttggtgttcttcaattagaattggagttttacctatgtaatatatgttgatcttttatagaagattttattacgtggattatcaagatgaaactccaattctgatcggagaacaacactaaaaacacttaagaaactacacctaagttttgtcctttattttatagtaactttgttcataaagttactagaatgatcaataaactacaaatttgtggttgaataggaactgagacgtttcccaactctccaagccgaaatagcagcagctacaaatgaggctttagagaggttccgcgaagagagtaagaagacagctatgcggcttgtggacatggaagcttcctatctcactgtgg

SEQ ID NO: 299633 - DNA, 397 bp, Glycine max
cagttttccacttgtactcgtgataaaattaaagaaacatgttagattaagtatcccacaatttaagcaagaataacttcattttggcttccaaccttactggtatctaggcattactatgtaacacatacgttttctactatgacatagtgcatagatcctaccaataattttcaagtactaattaattaaataattgaaagttgaaactacactatcgatatacattgattagcttcacaacttgctaacactagaacactgaaacattcttcattttacacaaaaaatactaataagaaataaaaagactgcgtggtgttggaagaaccaaaacgtagcaaactacactataactcattgcttaaagcatgaacaatcttaacctgaggaaaac

SEQ ID NO: 299634 - DNA, 318 bp, Glycine max
  unsure (1)..(318): unsure at all n locations
ntgcggatttggtcttcgccagagaattgatcgatgtgttttctaacagaggcaaatttgatcatcctactaggacgactgagaaaactggggcaaatgaagagggtgagaaagagggagaaacccatgctgtgactgccattcctatacggccaaggttcccaccaaacccaacaatgtcattacttagtcaataacaaacctactccttacccaccacccagttatccacaaaggccatccctaaatcaaccacaaaacctgtctaccgcacttccaatgacgaagaccacctttatcacaaaccaaaaaaacacc

SEQ ID NO: 299635 - DNA, 383 bp, Glycine max
agcttatgtgattatagtagctcagctgtatcattggttaaagaattggggggcattgaacttttggctcataggttacagaaagaggtacacagagtcattggtttggttggaggaactgataacatgatgcttactggtgaaagcttgggacatagtactgatcaattgtactcccagaagagactcataaaggtctcccttaaggcgcttggttctgcaacatatcgcacctgcaaactctaccagatctcaacattctcaagacagttcattacctataactctaaacttgatttttaaaaatgaagataaagttggaggtgacatttattattcagctgtactgatatgagtgaataattcacaaaatcctacctttt

SEQ ID NO: 299636 - DNA, 475 bp, Glycine max
  unsure (1)..(475): unsure at all n locations
cctactccaccaatattatctttatataangtgtatttatnctatattacanctctacnacaacagaaaattgagcatgaanctttgaaccagcagaccgggatcttggagcaccagcagcagcagcgttttctcattcctctgtttacgagcaaaagtagacagcctactcgttagactaattaaaactaagattcctactctatcctatgctggactagaccagcttataagctgacaaagttagaccaattagcctaagcatagcctcattcccgctattggactagatgagaccaacaacattattctaacagcatatcttaaaccaaacttaatccgcaaccctcattaagactagattcatcctgctaattaaagttaatgcacagaaatttccatgctaagtacctagcctgccacatagggggacgaccacagctacaaatctatcacttaatgagcatgacacacg

SEQ ID NO: 299637 - DNA, 305 bp, Glycine max
  unsure (1)..(305): unsure at all n locations
agcttatggattatagtagctcagctgtatcattgtttaaagaattggggggcattgaacttttggctcagaggttacagaaagaggtacacagagtcattggtttggttggaggaactgataacatgatgcttactggtgaaagcttgngacatagtactgatcaattgtactcccagaagagactcataaaggtctcccttaaggcgcttggttctgcaacatacgcacctgcaaactctaccagatctcaacattctcaagacagttcattacctataactctaagcttgatttttaagaat

SEQ ID NO: 299638 - DNA, 411 bp, Glycine max
tgtaagtattcgtgactcatgagattcatggaaagtaagcatttgttcttactcaagtatgtagaattattaatttttgttgttatcctgactctggagatctgcagtttaaccatatgttttatggaattgttcaattacaacatagttcactttttagtaaatattaaaatgaaagtctacttgttttacagagataaatagatgttttgcatggttgaattttgttaattagtgtgagcttgaagatgtatgctaaaatgactctgttactagttaaatttggcaaaaaaataaaaataaaaatcagcattctacatctacatcggttgtagaccaaaaacgatgtagaaactctacattctacatcggttggatctcataacgatgtagaaacttcacaattctaca

SEQ ID NO: 299639 - DNA, 93 bp, Glycine max
tagctttttactctatactaagtaatgagcggtcacttctgagacagatatatatacatatatacatatatatatatatatatctatacatat

SEQ ID NO: 299640 - DNA, 400 bp, Glycine max
agcttcatcctcagatccctcttgttggactaggcttaatttagacagccctcctaggtttagactaatttaaactaagtttcgtcctcagatccctcatgttggactagacacagcttaaatagcttacaaaagtttagactaatttagcctaagctttgtcctcatatccctcttattggactagacttagaccaaacaacattattctaacagcatatttaaaaccaaaacttaatccgcagatccctcatttaagactaagtttcaatcctgcttcattcaagttctaaggcaacagtacatttcccaatgctaaagtcacctaaccatgcacacaaatggttgatcagaccaaaagcatacagaatttaagcactaagagaagcattgaacacaa

SEQ ID NO: 299641 - DNA, 372 bp, Glycine max
tactgcgacatgaaagagtggtcagcgctttcagatttctcctagcccagcaggctgtcatgaggactctccacatgcccacacacgataatctttcataaccttcttccgacaatgatctctcatgcagctcatactcttaagactgtcactctatatgacatgctccatattatatgcagcatgcaggtcatatcatcaccatatactatatggactgctacttctgtcgacaagatcagtctctttagaatctataactgatccagacccaaccgactggagtgatacctatgtaagagcattccttcaaacgtttctttgaatcttcaatacgcagctcacatatctcaaacactagcaccgtacatg

SEQ ID NO: 299642 - DNA, 402 bp, Glycine max
agcttcttatccaaggctcatcttggtggtgaagctccttcttccatggcttattccttaatggatggcgcctcctctcacctcctttcctttgtcttccgctgcatctccatggtggaaaatcaccattaaaggaccccattgaagctcaaagatccagcctccatagaagccccacaagcaagcttccatcatagaagggtcagaatggtcgaggcagatcaaagtcaagagggaaaggtcaaagaaaatttcaaagtggcattacttgttggaattgtgacaagagaggtcacttcagcaatcagtgtaagccaccaaagaagatcaagtcgcacaaaaacaagaagcgcgatgatgatgaatccacaaatgcagcaactgatgaacttgatgatgcat

SEQ ID NO: 299643 - DNA, 416 bp, Glycine max
gcgcgggtctgggagacgaagggcaagtggaacgttatatacgattatgatgttccgagtacattggatttggtacgaccatgccctcctgatttccaggtgggaaattggcgagaggaggaacgccctgacattgactcagcgagcataatgtcaacctttacggatctaaaagctctatagctgggcctaggctttagaagttttcctttggttaaggctttgtgactttcgtttttgaatttataatacaaggaccttgtttcatctgttcctacgtatctacccattctcattcatttgcatgatgacttctttttctaaaacggcagatccgatgacgagtccctcgaaggtattaatacctgggacccgcctatcaacttcgagcaagagatgaatcacaccgaatatga

SEQ ID NO: 299644 - DNA, 349 bp, Glycine max
agcttgtaatatgtctagccaactatatgttcagttactggtggcctgtggaagatgattgggttttttactgcattgtataatgaatgatcgaggccgtacccgaatcaaataatcattaaaaatacagtatttaggaagtgatcctaggtcgtctcccaacgagcaatggtcaaccaaatgttcataacagatagtaataaaacagtaacgaattggggggggggggttgtttgtttatagaaactacacaatcataaaattctaattgtactatatcagagataaatcatgtagtatcaccttgattcacaagctaggttcttatcctatgataccatgatttatt

SEQ ID NO: 299645 - DNA, 428 bp, Glycine max
  unsure (1)..(428): unsure at all n locations
ctcaagcttgtggagcttagagaccttgtanaaagtcatgtgggaatatggtttattctatacttgcgtgatctgaagaggttgtctgagttctggtcaagttactgtgagcaaagaacatactactactgttctgtggtgcatatagtgatggagcttataaaattgattagtggatatggggagaatggtagattgtggcttatggggattgcaacttttggaacatacatgaatggtcaagcatgtaacccctcccttgagactatttgggatcttcacctctttacagttccagtgttactatcatccttgagactagcttaacttttgataggagataattatccttctatatacttcttatttatgcttgagtgtacaatattgatttcttagtgatattaatacgctggtgtttttgtctc

SEQ ID NO: 299646 - DNA, 216 bp, Glycine max
gaacctggaaacaaccgacccggaccctgagccacgcagcagccactttgtcaattactaactgacagcgctaagaaagcgggcaaaaccttggccaaagcacacaagagtaacaagcactggtggtggagactgaaacagagctaccgggaaactcggactagaccgacaaatgacctccaaaaaaccataaaggcccctaagccctggttgcac

SEQ ID NO: 299647 - DNA, 133 bp, Glycine max
  unsure (1)..(133): unsure at all n locations
tctacgcttaccgcaggaggagacatacaacgagggagaaactccacgttgtacgtcgcgcgcagctcgtcaacttggaggaactataccgtgttacatgcgctgctcatgaagacgatgtataaacccactn

SEQ ID NO: 299648 - DNA, 319 bp, Glycine max
gtaatgaacgatatacctgtgagggacagggccgatacgttaaccactatgaaagtggaaacaattgacttcccatgcgatctatcaaggacacgcgttgtaataagaccaccgacgagtacctttggtagagaatcccacaccaacctataaaagacgaatccccatggtgaaagtcaatgaagaattattgctcacagtttttgggtgaccacacgagatcggtactagaggctcgctggctagactgttctttcttgcgaatgtggaggagcatttgcggatgtgattaccataacgctaacttgaatatccccga

SEQ ID NO: 299649 - DNA, 413 bp, Glycine max
tcatgatgaatcaagatcggttcagagatgttctgatgatatcaaagatgaagaccaaggtgatgacgaaaagctcagcgctcaatcatagaatgagttcaagatggtcaagatagaatcacgatcacttcaagactcacgaggaaagtggaagaactcttcgagattcaagaggaaaggtgagtcctagaatcaagaatcacgattcaaggatcaagctttcgagaatcaggatcaagattcaagacttaagactcatgaatcatgagaaggcttaatcaatatcagtatgaaaaggtttcttcaaaaactaagtagcacatggatgtttctccgaacatgtttaccacagagtgtttactctctggtgactgatcaccagactgctggaatcgattaccagtagcagaatg

SEQ ID NO: 299650 - DNA, 387 bp, Glycine max
agcttctatccaaatggacttaccttgaattaattccttagatagcccttttgagccttgtttccttttccttgtttagaagctcactacaatccttatgtgaaaaaccatgatattaccatatccttaaggaattttggagctttggaattgttttgggaataacagtggggggtttttgtttcattgaacaacttgtattgttggctatgcttcatgatgtatgttgggccatacttgatgtacattgtatatgggataaatgatggacatgctgaatgaaatgttgtttctcaaaggctatacagtaaaaaaaaaaataaaattcgaaaaaaaaaatcgaataatagaaagagatcagcaataaagttgagtgaataagatctt

SEQ ID NO: 299651 - DNA, 419 bp, Glycine max
  unsure (1)..(419): unsure at all n locations
tgtatacatgaatttgattnttatgatgctcanaacctatatgttgggaaacataaacttcatcttcagtgatccatttagggaaacactcttgacatccatttggtctaactntaaatccataacataagcataagtagtaatcttaccacttctagtctagctatcggtgcataagcttaaccaaagactatactgttttgttggttatagctcttgactactatccttgccttattcctagtgatcaaaccatgttcattcaatttatttttaaacactcatttagtgtaaatgatgttcatgtttttaaaataaggtattaattcccatatatcatttcttttaaattggttcaactcctcatgcatggacatcatccagaacttacatttgagtgcctcttctatagacaatgg

SEQ ID NO: 299652 - DNA, 391 bp, Glycine max
  unsure (1)..(391): unsure at all n locations
agcttgagtgcttntgctgcaggacaagctgcagcctttaagatgtttgaaacaattaaaaggaagccagaaattgatgcttatgacactactggtcggcagcttgatgacatccgtggagatatagaacttagggaggtttgctttagttatcctactagacctgatgaactgatattcaatggattntctctttcaataccaagcggcactacaacagctttggtaggagaaagtgggagtgggaaatccacagttgttggtttgatagagagattttatgatccacaggcaggtgaagttctcattgacagtatcaacctcaaagaattcaaactgaaatggatcagacagaanataggcctagttagccaggaaccagttctcttta

SEQ ID NO: 299653 - DNA, 393 bp, Glycine max
  unsure (1)..(393): unsure at all n locations
gtgattggacatggttgaaaggataattatcaacacaattatacggttttttgtagatactactcaaacattggttacctcttttagttntagctcattgggggcaaatattaagccactcattaagattatttttattgacaacatgcctgtgtgtaaaatgatcaattaggatttgacagtgtcaaacaatggttntggatttgtattcagctcaatctatgcaagaaaaaccaaaaaggggatgagctctgatacatgcagaacataattaatcttgtcacctgctggaaactggctaaatccctgtttatatttggctgttgaatttcatggatatgctgcttgaagatttgattagattataatttatacatatggtatgacttgtga

SEQ ID NO: 299654 - DNA, 374 bp, Glycine max
agcttttaagtgcgggttcgggagacaaaggtcaagcgttcgcgatatgcgaagatgatattccgagtactttggatttggtacgaccatgctctcctgatttccagctgggaaattggcgagtggaggaacgccccggcatttacgcaacaagcataatgtaaacctttacggttttaaaaagctctatagttgggcctaggctttagagttttcattttgttaaggctttgtgtcttttgtttttgaatttataatacaaggatctttcttcatctgttcctggtctctacccattctcattcatttgcatgtttacttctttttctaaaacggcagattcgatgacgagtcccccgaatgtactaatacct

SEQ ID NO: 299655 - DNA, 402 bp, Glycine max
tcaccggatgatgcagatcgaacatttcctaatctatatcatccaattggtattcagcgattgaatagaataaacaatggccggtgtcggtcgttatatggccccgactgatatctttcagccgacattgcgcaatttcttttacaaacgcttgccgataatgttttttttttttttacggtagaggaagtttttggttttggtgttgcctacaaaatttacaacgtaagtcggctaggtttttccgtgcgagctcaaccgagggttcgctcccacagacactggcatgttgttcttctcatttatgaggacaagataacgttggcccatcccggcaaaaacaaataaaaaacattattcaccgaaattgatcgaaaaaaatgatagctgacgtcggaatgg

SEQ ID NO: 299656 - DNA, 384 bp, Glycine max
agcttattcttgtctgaggcatcttccaagtcaatatctttttcttccttgagttcatcatatatccaaaacggaaagtaatcattgcttgaaagttgatctggaagaggatctgagttcctccttctacttgccatttccatcaaaagctttccaaaactataaacgtcggccttatatgatactccaccaatatttttgtagtataattctggagctatgtagcccaaagttccaattgcttcaggtaaaacaagagacctatctttcacaggatgtagctttgcaagtccaaaatctgaaacctttgggatgaagctctcatctagaagaatattgtgtggcttgatatcaaaatgtagaatttgcacatcacaaccttca

SEQ ID NO: 299657 - DNA, 328 bp, Glycine max
  unsure (1)..(328): unsure at all n locations
tcccgtatccgtacttggaaggatctgattactgcctttctaangcaatatcagtataactccgatatggctcccgatcgcactcagctgcagaatatgttcaagaaagagggtgaaacctttaaagaatacgcacaacggtggagagacctggccgcacaagtggctcctcccatggttgagagagagatgatcaccatgatggtagacactctgccagtgttctactatgagaagctagtaggttacatgccgtccagcttcgcggacctagtgttcgccggggaaagaatcgaggtaggattgaaaagaggaaagttcgattatg

SEQ ID NO: 299658 - DNA, 379 bp, Glycine max
agcttgagctatcagaagacttgcttattcatttagtgttgatttctctaccttcacagtttagtcagtttaagatctcttataactgttagaaggagaaatggtctcttaatgagctcatttcataccgtgtgcaagaaaaggaaaggctgaagcaagaaaggactgaaagtgctcatgttgtgagtacctctaaagacaaaggcaaaagaaaaaggactgaggagcccaagaatgaagttgttaagggtccaagacaaaagaaacaaaatcagggtgacaactttttctcttacagtaagcgtggacatgtagagaagaaatgtaacaaatatcatgcttggcgtgcaaagaagggtatgtttcttactctagtcta

SEQ ID NO: 299659 - DNA, 416 bp, Glycine max
  unsure (1)..(416): unsure at all n locations
ntacaacacggccaaagtgatcttntttgtggggaacgatgctctggtcttccaccatgacttgtccataatcattccggcaacggaggaaatcagaacttgtgagaggttattaatgactntataccagaaccatctgaaacaaattaagaagatcgaacaaaataaaagtgaattaatattgcacatctatactaaatcaaatgatttgaacaaaggcttaactaactaattatgagtataccttgtagctgcatcttcttgaagattttagaatcgatcacagatatgattggtggttacagcgtgaatggaagaagactgaaaatgcctatgatggagtagctatccaatacttgatcattctattggttgtatcaacttctcgttggtatatacaggaatggtcttggatc

SEQ ID NO: 299660 - DNA, 402 bp, Glycine max
agcttgaagaggatgctttaatggaggaaaagaaagagggagagaagtggaactttgaagtgtatctcataagactttcattcatcaaagttacaacaagtgttacacatgcttctatttatagactaggtagcttccttgagaagctttcttaagaaaacttccttgagaagcttcgttgagatgctagagcttatctacacacacccatctaataactaagctcacctccttgagaagctagagcttagctacacacacccctctaataactaagctcacctccttaagaagagaagctagagcttagctacacacccctataatagctaagctcacccccatgacaaaatacatgagaatacaaaaaaaaaatcctactacaaagactactcaaaatgc

SEQ ID NO: 299661 - DNA, 407 bp, Glycine max
tacggacctatgaaactcagcttttatccaggctcatcttggtggtgaagctccttctttctggcttatttcctagtggatgacgcctcctctcacctcttctcctttgtcttctgctgcatctccatggtggaaaataaacattaaaggacctcattgaagctcaaagatccagcctccatagaatccccacaagcaagcttccaccacaagtagtataaaacggtaagaaccgagtatcgaactctcggggaacttgtgttatctggcaagctatttcgataaataagcgtctggtatggaaatataactgtggttatgaacaggtatttaaactatctaggcaaaaagaaagaaaatcacgtaagagaaatactatgtaaaaacaagtagagaaagcgttggtc

SEQ ID NO: 299662 - DNA, 403 bp, Glycine max
  unsure (1)..(403): unsure at all n locations
agctntgcggatttggtcttcgccggcgaaatgatcgaagtgggtctaaaaagaggcaaatctgatcatcttgctttgataaatgcaaaaaaagactggggcaaatgaagagggtgaggatgaaggagaacctcgtgttgtgactgccattcctatacaaccaagtttcccaccaacccaacaatgtcattactcagccaataacaaaccttctccttacccaccgcccagttatccacaaaggccatccctaaaattaaccacaaagcctacctaccgcacatccaatgacaaacaccacctttagcataaaccaaaacaccaacccagaaatgaattttgtagcgagaaagcctgtagaattcaccccaattccagtgtcctatgttgacttgctcccata

SEQ ID NO: 299663 - DNA, 426 bp, Glycine max
  unsure (1)..(426): unsure at all n locations
ntanagactcaatttcatttgaatgtggttgggacatatattgagttgtttattaaatcaatatttatttctaatttggaaaaatttagttattcttgttcaatttgaaataataaagttagtctctctcgtgattcaaatgttgtaagttatgaattcttttatggatattgagtgttcctattggaaacaattttaagtggtacaaaacttaaaattaaatgagaatttcatcactttataacataagtgctaagtcatatctcttaatagagaatttggatgcttgtgttataagaaattttggatcctttatattggttggaccttatagtctacattgagtatataaaggcacaataaacaaaacaaaaaaatggaattcatgtgctgaaagaaataaggatgtcctggaactaatacata

SEQ ID NO: 299664 - DNA, 399 bp, Glycine max
  unsure (1)..(399): unsure at all n locations
agctttgttggatttctgccatttggctctattttgatacctatccatataaaataataaatatttgtagcaaaaaaatatatacaagtgctttacaagatcgttagtgcaacatttgagttccatgtccttatttctaaaagttggatgaagaattttccttgagaaatcgaccaccccatgtccttatcacctttggtaaataaatttccttttgcaaagttcttatttctaaactttattctacattccatgtgatgaagaatttgacagtctgtttcttcggatggggaccatttcacaaaactctaagctttccagaagaatatagaaaaccaccgcataatttgttttcataattatacgaccttatgatattagtcaatgactatntaatat

SEQ ID NO: 299665 - DNA, 390 bp, Glycine max
  unsure (1)..(390): unsure at all n locations
tcatgatgatgaatcaagttgattcaagtagttttaatgatgaanaagattatgacaaaaagcctaaagaatgatttcaagattaagttcaagatcaagattaatttcaagattcatcaagaagattcaagattcaagaataatcaagatcaagattcaagactcaaagattcaagaatcaagagaagacttaatcaagataagtattaaaaagtttttcaaaacattgagtagcacaagaagatttcacaaaattattaccaaagagttttactctctggtaattgattacaagaatgtagtaatcgattaccaatgttnttacaacgttaagatnttcaaaattcagaatgaagactcacatctgttgatgtgtaatcgattacacct

SEQ ID NO: 299666 - DNA, 384 bp, Glycine max
agcttctcttggaccttgaacaagcaatcaactcctctttcagaaccctgctatgtgctcgcgactggtccctttcttcccttcgcaacttgagttcattattgctaccccatagagctccgcgaaatttgttccggccatactcttccttgcgagccctcttggtctcttgttcaagggctcttgcggtaattgcattctcttcccgtaacccggcacactccttccgaacgtgtgtagcagccaacttgaacttctccttggcgagttttgcctttcctaactcgcttttgagagcttggacttcttcgtcctcttccggtgcttcaaaattctcttcgctgacgactcttaacttggcgagccaatctaaacctcgcatgc

SEQ ID NO: 299667 - DNA, 340 bp, Glycine max
  unsure (1)..(340): unsure at all n locations
gcntnnancaaatcatataagataaatgcattcatgcaatctgtagatatatcctcccaaacgtcaaattctccgcctatatattcaacctttccatcactggcacgtggagtgaatctttctccatggtgcaatactaaagttatattgtcattcattctacacaattagaaaccgcaaacatggtcagatattangaaataaaanaacctacctcaaaaagcgcgaagacattgacattgtcaaaaaccgcgaagacacaatcaataaccaaaaacattgtcatctataaaaacagagcatcataaacgaacatattaaccgatcataaacctcccta

SEQ ID NO: 299668 - DNA, 396 bp, Glycine max
agcttgttaatccatggaagctcctaatatctcccacactttttggggtgggtcattcttggatggccttgattttctcaggttccacttggaacccatttctaccaactacaaaacctaagaaaactatattatctacacaaaaggtacacttctctatatttgcatagagggtgtttttcctaaggattgaaagaacttgcctgagatgtcctaagtgatcatctaggctcctactgtacactaaaatatcatcaaaataaacaactacaaatctacctatgaaatcccttaagacataatgcataagcctcataaaggtgcttggtgcattagtgagcccaaaaggcatcactagccattcatacaaaccaaacttggtcttgaaagcgtttt

SEQ ID NO: 299669 - DNA, 390 bp, Glycine max
  unsure (1)..(390): unsure at all n locations
ctggggaataatatttaacaactggagtattgaacttaacccacaacaagtttctagctatatgaactaatatatgtgtcacttctaatgtttctatggctggtacttttaggtaaagactgggaagaccagcttggagcaaatatcaagagtttattggaatcaggtaagctaaaagctaatagtcttggccaattctttttcttatccatgcacctttatgtacttgagaatccctaaacatacatgntaacaataattttccccatatgtaaaataacttgacaccctcgaacttctcanagtcattccaatttctattcgattcgccattgttactggtattntctacagattatgctcctgtcagtgttttgtaccatcaattgt

SEQ ID NO: 299670 - DNA, 584 bp, Glycine max
  unsure (1)..(584): unsure at all n locations
tcgcgcctcacacngccatataanactttcgttgtaatanggtcaagtatacatgtacttgttttaccactacacaccnanncccacgaagcacatttgaagcccttgagnccntngtgaaaaccagtcaagaacacgaggaacctcganagacgacctgcaagcatagcagattgtataggaagttatacaggctgacaagagagagggacacgaacggaactttgaatagcatctcagagacattcttcacaaagtacaacaagcgctacacacgcttctagttataaacaaggaaacacccctgacaatcctactgaagaaaactctctagagaagcattatttgaatgccagagctctacgacacacacaccatctaaaactaagctcacctccatgagaagctagagccaatctacacacaccccgttaaataactaagactcaccttccttaagagagagcaagcgtagagcattaactaccacaccctctatcatcagctacagctcaccctccatgacagaaaaccatgataagtcactaaaaaaatcctactactaagaacactcacaagctccg

SEQ ID NO: 299671 - DNA, 415 bp, Glycine max
catcactcgacccggatccttagagtcaccgcggctcagctttcttaacggctgaatctctccttaggcttatgttactatttttatgtttcatttcttcctgaggttggctgagccatagatctgaatgaagagacactagtgattcatgtatcctttgtctccttttccctttctccaagacctacagcgtgtcaagaaggatataaaagagaaaatattggcttcctttggctatatgtattccttagttagttgttcctaccttatcatgtgattctagatcactgtgaaatgaatagaaggacacctattgaatcatattttgaatactagatcaattctgctctgtctgtatatattgtggcatacgaaattatctattgtggaatttccacaaagccttgttgggatc

SEQ ID NO: 299672 - DNA, 416 bp, Glycine max
  unsure (1)..(416): unsure at all n locations
acggacctataaaactaagcttagaccgagcactcaaatctaggatctaaaacccttctatntagggatgttcaaggttgagaaggaaaatgaaaatggggtaaattnggagcaaactctcacctcaaaaaagtctatatcatcaatctaaacttgctcaaactggttttaccaagaanactctaccgaatcaaaagttgactcctcaacacccatattttaccctagaaatggctcttgcctttactttggtcatttgtttttctctcttgcactgcccaagctttctcataagtcctatatgacatttcaaactatgatttacttactataacctgtatttaccactgaatcccattgtatgcctccaactctcagagcctcactctgtttctactcataacactacattctca

SEQ ID NO: 299673 - DNA, 250 bp, Glycine max
tgcagcttgtatgattatggcgtacccatcacatgtggcactaggtggcggtcaggcgatggtgcacaacaagttgtccacattcacaaatcgcgcataaaacccaccatcccctggtgcccacctccaactgagcttacgtacttccacgtagcccatatccttgtttctctcaacaccgggtgcccatcaatcctcccaagcttcccaacattcaggctattcaacattcccatcatcacaaacttac

SEQ ID NO: 299674 - DNA, 486 bp, Glycine max
  unsure (1)..(486): unsure at all n locations
ggggaatttgaaaccctgttagagaccgtagctagcncagagccacaagatcatactcgggcttctccgatcggcatggaaactgacagtttcatgacaatatctaacaagctcgcccaaagacggggcttacgattgttggcacgcaccatatgatattgaacacacactccctccttcccagctatctctcttataaactctctagcttgtacactaatactccgatctctagtctgaacctaaccatgatcatttggttgacaacctccacaacttttacgtggtcatagacatacttctctttgagcatcaaatagcactgctcttttctgatagccttcaccaatcacatataattatttttatcagcacctctcttattgcaccatacttgccggatctacactatgctgttctccacctctgaaacatatactcctcgaatcgcagatagcatgctaccacgattctaacagaaccccg

SEQ ID NO: 299675 - DNA, 270 bp, Glycine max
taatatcccccacactttttggagtgggccattcttggatggcctcgattatctcaggttccacttggaacccatttctaccatctacaaaacctaagaatactatattatctacacaaaaggtacactcctctatatctgcatagaaggtgttcttcctaaggattgaaagaacttgcctgagatgtcctaagtgatcatctaagctcctactgtacactaaaatatcatcaaaataaacaactacaaatctacctatgaaatccctta

SEQ ID NO: 299676 - DNA, 381 bp, Glycine max
agcttatcattcaagaatttcatagttttcttgtaattctcccattcaatccatagatcatgtttacttgcatccatgttttcataatcatgatgagtttgtaacactctctccatagatcatatctttcttcatgtaggtgatcatgaagttctttgaggtgtttcaactcaacttgttagtcttctagttggttttccgacttctgaagatcttccaaaaagtcagacttttctttacaaattttcttattttcaagatggagctttgtagtctttagtttacgatcttcaaagacaacatgctcctaagtgaaaaattctaaaaaactattattcctttgaagttgcttatgatcttctgagaggagtttgacatatt

SEQ ID NO: 299677 - DNA, 367 bp, Glycine max
tgcacaagatctaaagaaaaacagataacacaactcttcatgcaaccgaggatctacgacagatttaacgtggttcagcaatgtgcctacatccacgagaaatggcagctcatcatcatcacattgatcgtgaaaaattacaagttcaatacaagcagcagctagcttgatctctctcggtttctcttttgcaaaacctctctcaatctcatagctgtcttttttttttaaactctctctctggttttctgcaaaaaaactctctgaattacatgatcaagagtatgtatatactctagctggtagctctaggcacaaaggctatactttggtgccaagaccaattcagttatgacaactgaattca

SEQ ID NO: 299678 - DNA, 389 bp, Glycine max
agcttcttagtttcagatgatgcagatgggtttgtagctacctcatgcactcctctaatgactatggcatcatttctggcgctaaactgctgggagttggaggccatcttctcaattaaatttctggcttcagtaggagtcatgtctccaagggctccaccactggcagcatctatcatacttctctccatattactgagtccttcataaaaatattggagaagaagctgttctgaaatctgatggtgggggcaactggcacatagtttcttaaatctctcccagtactcatacaggctctctccactgagttgtctaatacctgagatatccttcctgatggctgtggtcctggaagcagggaaaattttttctaagaatactctctt

SEQ ID NO: 299679 - DNA, 429 bp, Glycine max
  unsure (1)..(429): unsure at all n locations
ggaagctcaaggaagagctngaagaagttttggctattacttgcccaactcctttgagtgacatttgtattggttgttatcttgattgatgcatcttagtacatttgatatctgctttgcatcctgcatcatcatgggtagcatcgagaaaagtttctaagttaagaaaatttcttcagaggtaaaactctctatttaatcgatacagaggtgtcggaatcgattcaacaagctggttgaagcttaaagagttaagtctcatatcggtttaatccgatacaatagtactttaattgatttcactgctgttagaccatgactgatctttntcaggagtctcaactttaatcaattaccagtggattaatcgattacttctctctcgttcaagtgttcaaaggtgaactataacactttaatcgattatat

SEQ ID NO: 299680 - DNA, 400 bp, Glycine max
  unsure (1)..(400): unsure at all n locations
agcttgtagtgaggtttgactacaaaaattcattggtttttctaggattcaaaggtttagattctaagagagcacaagtcctagactaatcccaatgatcttttcttgttttgtacaaatagccttctcactattgccttttcttaagttgcttttgaccttattgtaacaacataacttattttctctctttttttacattcaacttatttgatgtgtgtcttgatgcttaacttttttcttttcattcttttcaacttttctcccccaaatttagagtaaatatgccttgaacaatatgctctcctagaatctaaacaaggtattaggagataatcatgtaaagttcagggttcaattcatgacaaatcaataagctntatacaacgcagcaaaagat

SEQ ID NO: 299681 - DNA, 90 bp, Glycine max
agtacgtgaaggaactcttgaaaaattttagatggacgatgcaaatatatgaaactctatacatccaccactatattagactagatatga

SEQ ID NO: 299682 - DNA, 400 bp, Glycine max
  unsure (1)..(400): unsure at all n locations
agcttgtgctgtatgggctgatcaatgttttgacaaagtaatagggatagaggttttagatgaattgataatttggtgtgtaattgaaggctcttgagttctgtaactcctgttgtgagaggtaatgggagcacaggatatatgtatataaaggcaagttgtgtgggcctacgggaagtatgattttttgtcgggatagaaattggaaggggatacatttgtaggtttgggttattcttgtttatgcatcacttgcagaaacacctataacctgacacttttatgtgtgtacaagttcttaatggattccanacatccatgatgatatgaaaataagttgaattatttatccagaagattgtgaaagatgtttccctgacaatattcttgttattggttt

SEQ ID NO: 299683 - DNA, 429 bp, Glycine max
tcaagaataatggtctcatcaaactatttatttctcgaagggaattctataaataggcctcctatttttaatggcatgggttaccattattggaaaacccgcatgcaaatttgtatagaggctatagatttgaatatctgggaagccacagaaattaggtcctacattcccactatggttgcaggaaatacacccatagaaaaacctagggaagaatggagtgaggaggaaaagaaattagtttaatacaatttaaaattcaaaaatataattacatatgctttaggaatggatgaatactttagggtatcaaattataaaaatgcaaaagatatgtgggataccctacaggtaacacatgaagatacaacatatgtaaaaagatctaggataaatacattgacacatgaatatgaattatttagaatg

SEQ ID NO: 299684 - DNA, 403 bp, Glycine max
agcttaatcccttgataattgagggtaggagatttgccctggattcagctagggactactttccttagcacccttatgttcaatatgttggataaataaaaatagtttttttttgctatatgcatgataatttcgatgctagttatcacacaaatgtattatacataagtacctatcacataaagagtggctatgcaatttagaatgcatcaagaagttttagattacgtggctacattctttggaaccaaaggcatcgcatggaaaaattactacatacccatatctaatgggaatttctattttcctacttggcttttgtgagggagatgtcaccacacgttatgcaggatggtggaagcagtcaatattgtatcatcatcgtgattttgcaaaaaatatt

SEQ ID NO: 299685 - DNA, 412 bp, Glycine max
agttggggtcacttataatttaactcattgatttgtcaagaaaactattggaaaaacgagagtgtgtaatgatttttgttttttgtcttgtatgaacatcctatagtaaaatttacatttctctctatatgattaactttggattttgagtcataccttatccaaaactaggcatacatgactttttatactggtaaagtttataaaattttgttatatgataagtataagttatgcaatagttttataagtactctatagaaggaaaaaaatgtaaacttgagttttaatataaatttttaatcagataaatatatttatgtataaatttggtttgggttggattagattgaattttaaaatgaaatccaaaatctgattctatccaaaacatatgagtttgttaaatttt

SEQ ID NO: 299686 - DNA, 399 bp, Glycine max
agctttgagaaacaagtgatcatccattggcaagtgatcatccattggcatcatcaaaacattcagcttgatccattatctacattatgttgacaccagagccatcgccaactaattactaatcagtaccatgatagggattgttacagcgtagatttttgcacaatagtccatgatccagttattttgcaacggaataaggtgtggtcttggcatgatgagtactaggtccacttggacattttggatagccatgaagtttatagcaaaccatggcagtgttccctagtttctcatagtattgacaaataacattctttgttatgcctgaaaatatggatctgccatatgttgaagtggtttgttaaacatccgcaagaccatgttttgatagtatgg

SEQ ID NO: 299687 - DNA, 153 bp, Glycine max
tatgttaatgggtcttaagaggaaagctcactaacacacactcaaacttacttattaaacatgctcatgaaaactattttttctcaattaaaataaatcccttttattttcctacaccaataacccaaactagaattaattaattaattaatt

SEQ ID NO: 299688 - DNA, 396 bp, Glycine max
agcttttaaaattttgaaataaaatgtgaaaaactaatttattagaaataagatttgctaaaaaaagataaaaaaaaaacaattagatcttaaaaaatgaacattaaaaataggtacagaagaagaagaagaagcatcttcaagaaaaaaaatacatcagcatcttcactcactcaccacgaaggttccgttctctgtgaatctatatatttctagggcacgttacgtggaacgaagctcttcactgaattcaatcgaagaagaagaagaagatggattgcgttgctggttcgagtttgtttccgttgcatcgttgcaaaaccattcacctggttggtaatattcactctcccctcttcaactcaccacacacacaacacaattatctcattcgca

SEQ ID NO: 299689 - DNA, 372 bp, Glycine max
  unsure (1)..(372): unsure at all n locations
tgcacacaagtttctccttgcctagcacttcanaaccttctggttgggtcatataaatgtcttcctctaaatccccatgcaagaatgcagttntaacatctaactattccaagtgaagattctttgtagctacaatgcttagaataactctgatggtagtcatctttacaattggagagaaaatctctatgaaatcaattccttgtttttgctgaaatcctttcaccataagtctcgccttgtatcttcttctaccatcaaattcttcctttagcctatagacccacttattctgtaaagctttctttccttctagcaatttaattaaagaccacatcttattcttctgaagggatgtcatctcatctttca

SEQ ID NO: 299690 - DNA, 303 bp, Glycine max
  unsure (1)..(303): unsure at all n locations
agcttttcgtcaactttcttccattgatctgggttgatcttaacaccgactaacctacctgaaattatcagccacatatgccacggtggtgccctagtgtcttgagaatcatgacttatcgcatgatccagtatgcccttatagtagatcgagctcttagcggatggactaattgtcactaagatactttaagtctatactcacaccttacccaagagatgaaaacctttagttaccattcaaaaggaggccatctgctacaatgtntatatatacatcatgtacctgatgttctacagttga

SEQ ID NO: 299691 - DNA, 200 bp, Glycine max
tgcactcattgtgtgaactccgtgagagtctgagggagtttccatagatgccccttattgtactgacgcatttgtcgaagcatagcttgcggaccgaacccagttactaggaatggaaggtacctttgaaattgccggtgactacagctgctactactatcataaggagtcgttcgcaatctaggtgatgaacatgagcg

SEQ ID NO: 299692 - DNA, 419 bp, Glycine max
  unsure (1)..(419): unsure at all n locations
ccagttctgcgcaagctgcgagaattttacggtggtcttctgatagcaccctgatgtactatggcagtgcctcctgtatagcttgcctacctatccgccccgctgagctctgtagagacactgggtggtgagcagctttctactatgcggcactactatcagttgcgaacctatcgcaaacgtggagaggaacatgactgaaatcgtgccgtaatcacgtggtcataaaccatcactcgaaaagaggagctatgcgcaggatcctctgtctcatccgaaattgtccgacggatgcgctgggataaggacattgtcgactgctngtcacacgagctatgtagtagcgcacataacaggtgagccgtgcatggattggtccacaagatgctttcgagaatttgactgcctgaacgcagacg

SEQ ID NO: 299693 - DNA, 310 bp, Glycine max
  unsure (1)..(310): unsure at all n locations
aaagttcccgatcaaagatcggaagaaagcaaaagaagaaaatttccgaccaaagattggaagaaagccaaaccgaaaagaaaagaaaattcccgatcaaagatcggaagaaaatgaaagaaatatgcagaaaggtctttggaccaggcaatatctgaacaatacagaattgtcacccccaaataaggaaataaaggaaaccacgaccggaagtggtcctctccctttgatcgccaaccaaaatcctgtgcgctagcgactttctcaccccgcactaaacanaaacagaaaaagaaaagacccaaacact

SEQ ID NO: 299694 - DNA, 416 bp, Glycine max
  unsure (1)..(416): unsure at all n locations
tctcaaggaagttntcttaagaaagcttctcaaggaagctacctagtctataaatagaagcatgtgtaacacttgttgaaactttgatgaaggagagtcttgtgagacataactcaaagttcaacttctctccctttttcttccttcaatttcgtgctcccccctctctctttctctccctctttcttttcctccattgaagcctcctctccaagcttcttatccaaggctcatcttggtggtgaatctccttcttccatggcttattccctagtggatggcgcctcctctcacctcttctcctttgtcttccgcttcatctctatggtggaaaaccaccattaaaggacctcattgaagctcanagatccagcctccatagaagctccacaagcaagcttccatcaagtggtatc

SEQ ID NO: 299695 - DNA, 393 bp, Glycine max
agcttatgcatggattatgtaattatgaaattgagatgcccgaagaaacaccatttcctagctaaccatgcattaggtaccatgttcaattattttgtttttgagtgaaacgggtttatgatcccaacatggttggctcgtggtgcctaacacatgaaactaagaatgtagtgtgaagtttcacgcttcccccttttttgtttttgttatgtagaggaaaacgcaaggatgagcacacatgaaaacaaatggtatgcaattttgcagatcaaaaagtttgttgaacgcatatgcatgatgatgccatgactcatgcaaaatgtgaggctggaatatgataacggacaaatgcaggatatgtccattatgatgttatgaagagatgcttatgcg

SEQ ID NO: 299696 - DNA, 403 bp, Glycine max
tatgctacaaacatttataatagaccctctcagtagcattaccaacaacagcagaataattatgatctttcaagcaacagatataatctaggttggaagaatcatccaaatctgagatgggcaagtcctccacaataacaacagcctatccctcctttccagaatgttgttggtccaagcaagccatatgttcctcctccaatgcagcagcagacaacaagcagctgaggccccttctcaaccttccttggaggagttagtgaggcaaatgaccatctagaatatgcaatttcagcaagagacaagagcctccattcagagtctaacaaatcagatggggatgatggctactcagttgaaccaagcttagtcccaaaattctgacaaatttccttcacaaact

SEQ ID NO: 299697 - DNA, 383 bp, Glycine max
  unsure (1)..(383): unsure at all n locations
agcttacatcacttggaaagataaagatatagattcatcaggagattcagaaaatgaagtcgtgaatctgagtctcatggccaaaaactatgatagcgaagaagaggtaacatcttctaacaataacctatctatttcctttgatgaacttcaagatgaatttaatgacttgcataaagaatcagtcaaacttgccaaactagtttcagtttctaagaaaataatttcaaatttagaaaaagaagttatgaaattaaatatagaattagaaaatcttaatactgaagtcaaaacattaaaacaaattgatagaaatcaatcttctaccataccagatattaataaagtatctcactcatgtanatgttgtgataaatttaaag

SEQ ID NO: 299698 - DNA, 413 bp, Glycine max
tcctcggggccattcctgcgaaggcaaacatttggaaagttagttttaccagtgggacgttactctttaaagcaaaaatggaatataacctcctcccataaatacaaacatcaatgtaaatttagagtaagcttatgcgcatacttccttacaaatgttctcttgcacaagacattctattaaccgaaaaaatgcacccatatacaatcaaggcagctccgttacctagattatttacacgtacttccaaggtgtatttgttacttacatcccacacatctccttggctaaattcacatacatgcatacccaaagcattttggggtaccaaaaattgcacatgtacacctcttggtatttctaatacctatacatacacaaactttatgatgaatcttgactatctacacaat

SEQ ID NO: 299699 - DNA, 319 bp, Glycine max
agcttctatataagctgaaccattttatcaataaacacaagttgagttctattcagaaaattagagtttatctcttttatcttagtgagagtgattctcctagattcttgagtgattcaagaacaccctggctgtatcaaaggactttcacaacctttgtgtgttgccctcgctggaaagagtgattctttccttccaatcatctccacccttggtctttcaaaccacaattccagaaaatccacctctgcccaaaattatctcgtgaaaggtctcgttctgaaattcattttacgctcacgaatcacttactttgagt

SEQ ID NO: 299700 - DNA, 339 bp, Glycine max
  unsure (1)..(339): unsure at all n locations
tatgaccattcgaatttctcgagagtttccgttgttcaatttcgagcgtgtagatgagttatgtccccgaatcggacatctgtgtgaaaagttatgaccattcgattttctcgagagcttccgttgttcaatttcgagcgtctcgatatattatgaccccgaatcggacatctgtgtgaaaacgtatgaccattcgattctctcgagagcttccgttgatcaatttcgagcgtctagatgagttatgttcccgaatcggacattcgagtgaaaacttatgaccattcgaatttctcgagagcttnncgtggtcaattttcgagcgtctcgatatataat

SEQ ID NO: 299701 - DNA, 400 bp, Glycine max
agcttctacttatgtggcagggcgggcttccttcaccttcttgtctccaacgcgaactttgaccattgttcttccttcccgcaatgcttctcttcatgtctgcctgagtgggcttatagcctaaaccatacttcccacgatttccttgagtatttatcaggctagttatgccgccgttgttttttcctaaacccatcccgggttcaaaaccgttccccaacataactcgggccatcattaccgctgcatcggacagacaaagttgcccaaagagggagtccacggaggaaatgctgaccacctcaaaagactggaaagcagtttctaacgattcttctgcggcttccacataaggcatggaggatgggcagcttaccaagatatcttcctcgcctgacac

SEQ ID NO: 299702 - DNA, 296 bp, Glycine max
  unsure (1)..(296): unsure at all n locations
ntgagggtgcgtagcccaccatctnttcatagtagagtatcgataatgtgtctaccatcacgatcatcgtctccctttccatcattgggggtaccacctgtgccgtcagatccctccaccttttgggcgtgttctttgaaagatccgtaccccttattgtaaatgttatgtagttgcatcctatacggaaccatatccgaattgtactgatactgactaacaaaggcaaccattatgtccatacaataatggactcttgaaaagtgcaagttagtgtaccatgtaacagctacccc

SEQ ID NO: 299703 - DNA, 375 bp, Glycine max
tttctgaccgattgtctctcaatatgcacgctccattcagatacccatgtcatctcaggggggtagataaggaattggtgcccaatcgtgaattctgtaaagccaactaccccatcaaacaccttatgtatacctgtaagcatttgtatctctattgcctcttcaacaactgtatgatctgtgagaattatatatgacaccaattctctacccggttaactcagtaatatctttctactccctatatgtatctacccttaaatgacctaaattccatcggctatttattaaaaccgatcctttctggaaagttattctccctctttaacacaatcggcattccctccccgcatttaataccataatcctcgaccg

SEQ ID NO: 299704 - DNA, 151 bp, Glycine max
agcttttatctgataatatataagattcagctagcctatgaataggcgtagaaataatcctaggcgagttatattttgatagatctgattccgagagtcatatgtgtatgatgtgacttagagtcgtctacctatcaatagcgtctctaag

SEQ ID NO: 299705 - DNA, 114 bp, Glycine max
tagcatgtactatgatctttgttggcgttcatgaagaccattgtccgaaagtagttagcattgaaaaacctcgaaaccatagcattggggtgagaaataaacctccacccttgt

SEQ ID NO: 299706 - DNA, 98 bp, Glycine max
ctgcaggcatgctgccgttttcaggattattcagaccaaacacgatcacatagcatggtcttgagagaacagctatttgcttgctaaaagttcatttt

SEQ ID NO: 299707 - DNA, 320 bp, Glycine max
gctaagtgctgagttgagcgatagtgttttatccttgtttgttcgggctcgttgaagccttatctatcattcccgacatgttgacaacctgtcgagagctaatagagtatgctggacataaatatttgcttacaatgtccaatgcaatcgcgccttgtccataatgtggcgtatctataatctaatatctgccaatacataacatatttgaatacattggaatattagtccaattatagactatctgtttggaggggagcccggctactaacggtcacactttcactttcctataacagaccagacccgcaagattgaca

SEQ ID NO: 299708 - DNA, 565 bp, Glycine max
  unsure (1)..(565): unsure at all n locations
ctgccacacaccntggtacatcnntataacatatatgatcatataataattagcacaccncacaccctnntnncnncccccaccagnacagcnnccttgaaaccctgttganaccntagctannacgngacactatngaatactgaagcttaacaagntcatctatggattgaaacaatcctcccgcctattggtattacaatatccagaaggcatttcctcattcagcgttgaagagaatgtcccggatcactggttaaaccacaagggcagcgggagaaagaatcgtctccttgtattatacataccatgatatcttactcgcgactaatgataagggaatgctatatgaggcgaaacaatctctctcaaagaactgtgataagaaatatatgggagaggcaatttacgcataggcaaaatactcataacaaagaactcgaagcattgtatggttgtccacagaacctatatcaacaaggttacagagaatacaaagaaagattgtcaccaagtgaacctccaatggaaggtgacaacttcgttgaagcatgcccataatgaa

SEQ ID NO: 299709 - DNA, 224 bp, Glycine max
ccttgaggacgacaggcggggtgctattgtccaattccaatcttgaccaataccgatcctacccgggcataaggaattagcgataaccttggaagctgctgagcatgcgagctccagtcacttgccatatattaggaggacttaacctcaaatcaacgatgcttgcggtggctcgccaactctgaattttgcgctatctccgtgaacggacacgggtcatcatt

SEQ ID NO: 299710 - DNA, 294 bp, Glycine max
acttatcacacggaagtccgattggagtgcataatatatcgagaccctcaatattgcaaaaggtagtcctaatgaaagataaatggggataactttttaaacggaagtctcaattcaagtgcatacaatattcggaagctcgaaaatgaacaatggatgctttcgagaaaattaaatggtcataacttatcacacggaagtccgatttaggcgcataatataccgagacgctcgatattgcaactcggaagcactcaagaaattcatgtggtgataacttatcacacggaagtc

SEQ ID NO: 299711 - DNA, 244 bp, Glycine max
accccagccaaacagccaataagaaatattacccagaaccacgcccgaaggaaaccgcaacaacgcaaattagacaaaagcatagaaaggacatggaaaggacccaacaaccgagataaacagatatgagaaagcaaaaggaaaaaagcaagaacggagaacgacctctagtaaaagtaaaacccctgaacacaaagagagcccgaaaattcaacacggaatgtcaagtaaactagcaagggaa

SEQ ID NO: 299712 - DNA, 563 bp, Glycine max
  unsure (1)..(563): unsure at all n locations
acccaccacccactgcactcacctaatacagctgacatgttgcacaatcgtacataataacacaaaaacnnaaaanaaaaaacgagnnacattgaagccattggaagccatgtagaatccatggccaacacnagctcnacacccggagaaccacctgaggcgacctgcaggcatgctagcatttgtgagctttttaagtctcagagaaacgagacaacgtgataccttacgacaggaactccgaaatactaatgagaactaggagtatcacctatcccacaacgacgaggtggaaggcatggccagcgaagtaccaccatacacagtaggagaacagaaactagtcatgtactcaacagctataatctatgaacaccatattatcccgtatacacggcccagtacgcgggaacggacacacaagcacaagcaaacatcacgtgtgtcagctaacaacaactaaaacagtgttagactagataagcacatgagagagacatgaatggaaaagaagaccaacgccataaaccctgagtgtaagaaattagacaaaatgacgaacc

SEQ ID NO: 299713 - DNA, 521 bp, Glycine max
  unsure (1)..(521): unsure at all n locations
nggatgccctttgtgatacttatttgaaacccatggtcaagcnccncagnggaactctataatagttgacacttcacagcatgcaaagctttcttgtctatattgtataaantatttattcttttgacgcatcatctgacctcaatggcatatatctttattactgaatatcccacgtcctactcgttaatcaagctattcgctcaacacttaatgtcactatcttctgatatctgaatttctcactcactgtaatttgatgatcacgcatctagtgcatcgaatttctcatcaacaatacgtgtcctggctgccactattatgtagataagatgctcatgtcaggtctctcgagttaatgtactatatgctcccatctcccccgagttccaaagatcaaccatctcacccccgcttactttgttatctttggacttgacattctcaactcactgcacgaagtacacacgatcatcctatttctagtttttgcttacctatgccctacttattgtaccacg

SEQ ID NO: 299714 - DNA, 287 bp, Glycine max
taatacatgcaattcatatgatgaaaacatttatatcactaaaatctatagtaactaattaatttaattctatacattattacatagacggaacgtttataccatgcatcaactaaataaacctttttaggaaaaaataaaataaataaaagtgaagaaaaaaaaagaagagagcaacaaaagacatcccgtgttcgagttcttcattgataaaaactaacaacgtttacaagttattctaatctcaaaaaaaaatgaatcagcatagagcttcacatcattattca

SEQ ID NO: 299715 - DNA, 204 bp, Glycine max
ttttggggacggcaacaaacccggaatgggtttaaggccaaacaactacggacccacttacctggtcaatgcctaatgaaatcgagggaagtatgggttaagctataatcccactcccgccctatatgaaaagaagcatctttggaatgtagaacggatgccaaagctcccagttgtgacaagaatgtgaagggatcccaccct

SEQ ID NO: 299716 - DNA, 406 bp, Glycine max
  unsure (1)..(406): unsure at all n locations
agcttcatgtttataggataaattattntcttttgttattcactgacctaaagccataatttaaaaatgaatattcaccaaactgttaacaagcattgctcaaacttaatgttatatttctgattctgatttctcactagtgaatttgaggatcagcagtagtgatgaattccacagaagaagagtgtcgtggctgcgagattatggagaaagatgctcatgtcaggtttctcgagttaatgtactatatgctcccatctccgtacgagtcccaagagatcaaccatctcaccctcgcttactttgtcatctctggacttgacattctcaactcactccacaaagtacacacgatcatcctattcctagtttttgctntacctatgccattactattgttaccatg

SEQ ID NO: 299717 - DNA, 423 bp, Glycine max
  unsure (1)..(423): unsure at all n locations
ntagcanaaaatttcgaacaactataggaataacaatttgttaaattttattaaagtcatttattttatttatataactagtattttaatacatgcaatttatatgatgaataattttatataattaaaatttataataactaattaatttaattctatacattattatttaatgtaatttttataccatccatcaacaaaataaacctttttaggaaaaaataaaataaataaaagtgaagaaaaaaaaagaagagagaaaaaaaaaacatcacgtgtttgagttcttcattgataaaaactaacaattttaacaagttattctatctcaaanaaaaaatgaatagcaatagagtttcacatcattattcatcacatttgcaagttgatttaattatgaaacaatgatacacaaatactcag

SEQ ID NO: 299718 - DNA, 400 bp, Glycine max
  unsure (1)..(400): unsure at all n locations
agcttgttacctattatgactntgacgaagagcaacgcgtagccaatggccattgaattcttttccttatcttccaatgctgcccttaccgccgttagcccttggccaaaagaatttgagtatcatatttatatgtttgataattattattattgttattattttttctcttgatgcacgtaaaagagaataacctaaacttttatatatgcgcattcaaattaaaactaacatacataaatggtcaattaatggatcttacataatgactcgttttcctttgcttctttcaagagagatcatcatcaattgatatggaatcatgtgtgcctcctgcatttagatctcatcccacagaagaggagcttgtggngtattacctcaagaggaagataaactc

SEQ ID NO: 299719 - DNA, 384 bp, Glycine max
  unsure (1)..(384): unsure at all n locations
gcactcagctatgtaggcaatcgtgatctttgtgggcctccacttaccaaaatatgtttccagggtggtaaacctaacaacacagagccaatagatgaagatggagatgagtttgcatttttgtcgtggctttacattggaatagaatctggatttgccacgggctttttgggattttgttgtgtcattttcttaatcagaaaatggaggcatgcatacttcaagtttctttatgacttgaaagaccaactttatgtcatggtggccatcaaaatgaattcttttcgttgaggtcggacacaaccatactggtaagtaaaacctttgattagttgaaatttcngtttttattatacaagataaacatagaccatattttaacat

SEQ ID NO: 299720 - DNA, 268 bp, Glycine max
agcttattcagattctgttttacatattcgagaattactaccgggcaacgtgaaagtcttaattcagtggaaaaatctccctcccagtgaacatagttgggaatctgcggctaaatgacaataggttattccgacttatcaccttgaggactatgtgagccttttaggcggaggtattgattagaataagcataatccacacatcaccaatgtgtacacccgcataaatcccatggtgtgcaaaccacccaacatttacaacccaccc

SEQ ID NO: 299721 - DNA, 426 bp, Glycine max
taggagtgaaccattaaggcattgaccaacagtatgccatcttcttcacagtgatattgagggggaaagagagtgtgcgttaattaaatgttttgaagttataaacccagtttacatgtctctcattatatcggttgagctatcttaaaagaattgaagatgttttaaactacacaacgagacatcttttttttcatttctataaattataccaatcgccattgtaatatcaagtttatcaagtgatcttactaagattttgttaaaaataatcccacatcgagtaattgatgaacatgataagtgcttatatagctaggtagaccacccccttatgaaccggtttttaaggtgacctttcggatgcctttgctacactataaaatctgatatggtatcagagccatattcaacagccctgactcg

SEQ ID NO: 299722 - DNA, 400 bp, Glycine max
  unsure (1)..(400): unsure at all n locations
agcttgtaactcataattnttagttgaaattgtcaattttacacatgcaatcttaattctcaacacactntttggatgagtcttccaaggattgtgttgccttctctaactnttcttccttttccagcgataaggtaaagctacaaaattgagtcttccaatgtttgatataagttttgcaagaccatctttaattcgaataagtggcttaaaggtgtaaatgcacagtccttccaagcgagcaactcanaggtgtaacaccatcttagaatttcgtatgagcatcttcaatgaaaatggaagacttgaacgaaaatggttggcttgctcctcattgttctgggaatagataaggatctatataatgagcacaatgtatgaaggatggaanaacttcaat

SEQ ID NO: 299723 - DNA, 433 bp, Glycine max
  unsure (1)..(433): unsure at all n locations
tgtgcatccaataccctgatgaggatgtcccatatgttcttaaaactggactaattcatttgcttccaaagtttcatggccttgtaggtgaagacccgcacaaacatttgaaggaatttcatattgtctgctccaccatgaaacccccagatgtccaagaggaccacatatttctgaaggcttttcctcattcattagagggagtggcaaaggactggctgtattaccttgctccaaggtccatcacgagctgggatgaccttaagagagtattcttagaaaaaattttccctgcttccaggaccacagccatcaggaaggatatctcaggtattagacaactcagtggagagagcctgtatgagtactgngagagatttaagaaactatgtgccagttgccctcaccatcagaattcagaacagcttcttct

SEQ ID NO: 299724 - DNA, 397 bp, Glycine max
agcttgtattatagttaagagtcatcgagtcactataccattaactatgaaaaaaagtaatgatccttttgctttaatccattatgacgtatggcgtccatccccaaaatcttctatatatgggtatagatggatagcgatatttgttgatgattgcactccaacgacacgtattgacttgatgaaacaaggatatgatgtggtacacatacttgaacaatctcatactatgattcaaactcaatattcaaagaagactacgatccttcgctctgataccatgtataactgatatgatatttgcatatatctcaatcgcatcttacaaacggaaatatgttatatgtatatacacagacaaccctatgtctaattataactagatcacgataattat

SEQ ID NO: 299725 - DNA, 431 bp, Glycine max
  unsure (1)..(431): unsure at all n locations
tttctttcttttgaggatgagaccagtctttatccccaaatacatgggttttatttctaatatcaacccaactataacctggctacttgttcatgttgctaatttttatcatcttcctcaaacttcgtacatcttcccattgctactcttttgcgtaaatatttgaaagccaaacatgagccacactatttttaggttcagccttcatcaatttgtctgctgcaagattggccctttccatgtccccatgaattttacaagccccaagaaaagaacaccagccaaagacatgttatttataaagtcttctgcttctttaagctttccagctctacctagcaaatcaatagcacaactgtaatgctcttctntagggactaccccataaatcttttcatggaattaaagtagttatacccgtcctcaaccat

SEQ ID NO: 299726 - DNA, 568 bp, Glycine max
  unsure (1)..(568): unsure at all n locations
cacttccccacatactccattaacactattntacaacatatagtgtntacttacacgacacattatatttatcannccccnagaggggtttgaagcattgangccatgganaacnaggnnagacnaggtgatcctctagagatcacctgagagcatgctcacgtgttttcgctattgtgattcaaaaagacccgcgcatctccgcacgcgcacgcaacttcataataagcttacagacggagcacttaacagactaagcactaggtcaacagaaaaactactacaaagaaatagagtcgaacatgattaggatcaggatcatgcaccaattcgacccaagaatcaaagaataggcctaaaatgacaataatcgccgaacaaagtgaactacaattcacttaacgcggaaataaaaggctgcaacatacttgcaacaatttgcgacgattactatgagtgagaaagactctaacaggatagggagtatgtgatgcacacttatatatattgcgcatcttcagaagatgaatcatgggtgggagaacttaaaaggaaggtcagcaccccg

SEQ ID NO: 299727 - DNA, 384 bp, Glycine max
  unsure (1)..(384): unsure at all n locations
ntgagtccaacattcagttttatacctgtcgtcatactttattttncgccggcgacctttgcttgatgacatgcgacctttctttggtccttgtgaggtgcttggcacccatcattaggcaatttgtgaaattccaggacatgccagaaaaccaaaaaatattgatgcacaatccgtaagtttccgtgacacaccggaaatcaaatggaagcatcgttgcataattaagtgagattccgtaacattccgtaagtcaaaaaggggatgattatgtaattcgcaaggttccgtaacattacggaaagaaaacaagtatcgttacgagaatcgtaagtttccgtaactttacgaacaaagactcaccaaaaaaggaagggggtgaac

SEQ ID NO: 299728 - DNA, 232 bp, Glycine max
agctgtttgtcgtctcattcaattgctgattttccagcatgctctgaatagacttgcgcatcggtttacacatcgactacgcatcgataccatacctctatacactggcggatgacgcgaggtaattacccttctacgctcattgatttcagaaaagacttcacgatctagacgaaccttggcattgccgacttttcctctttgtcaaccactgccatcttactccaccgtt

SEQ ID NO: 299729 - DNA, 392 bp, Glycine max
taagcttgtataaattcttgtgatgaagcacatttttgaatccatctctattatcaaataaataaaggctgaagcacagtgcttcatgatatttcaaaatcatggagaatcaaactttccatgatgaccatttgaacaactatatttctttggataaaactttttgcactaacagattagtcacttaaaagtatgatggaccaattggcagcagatccagtcaaatgtggaaatacttatccaatacctgccataactttaaaattatatacagatcatcactgttgttctcccaaacccgtgcatttccaattgcaaaacaaccacatggcgatctaaaaggatttgagtccagaggagctgcatcattatacacaatcacatacatcatg

SEQ ID NO: 299730 - DNA, 563 bp, Glycine max
  unsure (1)..(563): unsure at all n locations
ccctccgtcatctcgcacatcttnatacatanagaaagactagangtatanancgctctatagatgaagtacacttaagaaancnnnaaaccagaggcaacgttgaaccctttgangcccatgtgcanccccaggcgataccagctcgacacccggagatcctctacacgcatccgcacgcttgcaanctagtatgaacatggtataggccatctagaacgtgccaacgcatgccatacacacgctgtttcgcttacgaatcaatagccagaagaggataaagcaccgaaatgaacaatctgaaacataaagtcactgaaccaaaatagatacctacacaaatgggacaacgcaaagctatcactgccagactgagaagcaatgtttgataggaggctacatacatacgttttgctcttaccactcaaactgaactaaatcaccaatcttttctatgactcacgcccatctacataatcaaaaacttaaacgcatcacacctgcctccgcatgactcaacgttcatagctaaacaaagaactatcatcgtccaattaataacc

SEQ ID NO: 299731 - DNA, 83 bp, Glycine max
gtggaactgttcctcaagggattaaaggaagagattatcactaacgtgaggcttcatgaaccatagaactagatggaagctat

SEQ ID NO: 299732 - DNA, 368 bp, Glycine max
agctttcatctagcctatattatacaaaagtgttacaacagaacctaacggtatctaattatatgggccatcaaatctatcatgtgttgacagtaattgattagcccatgaatttcctcgggggctgtacacacttcaacgatggcttttgctttggctaatagtcgcgggaggtcttgacttccattcaaggtcaaggcgaacctatccatccacatagtcgcttcttgatgcaatgcatcaatcacctccctcttgcttctttttcggtgtacacttgtgcaaaatcctctattagcttttgttcatgggtcatagactgggtcaactcttccttgtactgccctatgatagctagcatgctttgc

SEQ ID NO: 299733 - DNA, 387 bp, Glycine max
tcaaagatgaggtcaaaggctacattctgtgtcaaatacctgtgtcttaacattaagggctgatgggtatttcgggttctataaaaaagacacatatttttgagattccgatcacgccaatgtgaccggggttcggtgaatgccgtaaaaacaatctcaatgttataaaaagataactcttaaaatgtctcattctctatggttattcaaaggaagtgtatgatcacccgattacagtaccctgcacatagaatacactatgaggagctcaaactagttacgagaatgcttagaactcaaggctacctcagggaaactttgaaatggaggattctgaggattatctccatggaatcttctaggaggattctgaggatttcactctga

SEQ ID NO: 299734 - DNA, 383 bp, Glycine max
agcttgattgcaagttgctttgtctatatgcatcttaattcttctagatcccatcctaccattacaccaagtgagactagatccccttgaacagaggtgggtgagatcattctagacagaccaattggaaaaatcttcacaagattgcttgaggggaaggtagccaccaattctttcatgtgcccctgaaaccgcattgaaatcaccaatgtaaacccaaggtccaaggaagttgatcagcatagaagagagctcatgccataagattgctcttttaatgttggaggtggaaccataaatagtagctacataacatgaaatgttgttaatagaaactacaaaagacatgctttgatcagagatagctaacatagacaaggaag

SEQ ID NO: 299735 - DNA, 311 bp, Glycine max
tgcacgtcttcactctcctcaagcattttatcctcttcctcgctcagactctttagctttgggagccaagttatcccttgcgtactcgacttcaaccatttgagatagctgcctatgacaccttggctacttccactaagttctttatcttttctttctgctttattccattccttatagatcctctggagtgtctttacattagcttcattgaaacctcgcgtgatgaaaggcgcgatggtctcctccgatggtgcacctctcatagggtaacctaactggcttatggccaacatgggattataattaat

SEQ ID NO: 299736 - DNA, 377 bp, Glycine max
agcttgtaactctgattcaatgactgttaaaaacggttaagatatactgcaaaattggcgaactttatcgctatctcaagatttcaaatcatacaatgactgtactttgaaaaaaaatgcctaacaactatctttagcttaaaattgcgtcagtagcataagaataatgcttgtattcctttgttcacaatgtaaaagataactgtataccacaacaaatatttcttaggcgaaaagaaagtgagcaattcagatatttgaaaatgatttatgttttgatttcctttcaataaattacagatgtataaacatatgctatcgcatagtccgatgattctttcttacgttaagaagagattaatattatgttctatttg

SEQ ID NO: 299737 - DNA, 465 bp, Glycine max
  unsure (1)..(465): unsure at all n locations
atganaccttgtgattgacaccnttgcattacgngacacttagaatactcagcttcagaataattgggaaaccgtaatttgtttaattcattcttattccagacttgtatcattcgaaatatattatctacctatattttattatattatgccatattttaatgatggcagaccattggtatcacagaaaatgaattgcacttttgcattacgggtgggcncattctagtgatgagatttacttacttctacgtttgtaccactacatgcgggccttaacagtaaagattattgtaatttcaaacacttaatgcatcttctatggcatatttggcaataactatctctaaaccgaaagagaatatatgttggtgggcgctttcaacaccggagtaaatttgtggtattaataagtacatcatattaaagaggatctcatacagcatcggtttaaaaaacagggcg

SEQ ID NO: 299738 - DNA, 304 bp, Glycine max
  unsure (1)..(304): unsure at all n locations
ttacattgtcatccattngagttatcccagaatgtacatttttgaacacaagtgaaatctcccctttcaaagatgaaagaaacgaatggtcaagtatcatcaacccctccccacccacctgacctcaaaataacggctaatgttaaacactcctcttttgcatttcatattatacaataaattctatatttacaggagtgtattcatattagagatgaaaaacgtacgattacacaccatgttaagagatgaaaactgaacagactatgatactcactcgcgcatacattgcttattacttata

SEQ ID NO: 299739 - DNA, 413 bp, Glycine max
  unsure (1)..(413): unsure at all n locations
gggattcggctggtctacatattcagtattctatngagagacttgtatactatgatgggaagctgcacttgaaaataccatcacattttctaaactgggatatttctggatatacttcacgtggaatcctcaagttgactatcaagtaattctgtcatcagtgaggtgatctactttggcattttctcatcatttgaaagactcgcgatgcaagctatatttgaaagtctcaaggatgtatcagcctctaattgcatctcattgtcctcagtatgcaatctatcgccttttcacctaaaatgaattaaaaactatctcggacatgaaacaactcctacagcaaagttgctatcaatattgtctagctctatctatgcattgagggactgaccacattgaaagtattgcgcttt

SEQ ID NO: 299740 - DNA, 403 bp, Glycine max
  unsure (1)..(403): unsure at all n locations
agctttgacttgagtcatcaagagattataaatatatgaccatggcatgaatttcataacaatctttttcaacatctctttcaataatcaagaatctatctttcaatcttctctctcaacatcattcaactttttctacagaagtttgtgattcttcttctcttcatctttctaaaagtttttgttcaaaactttttctttcaagaaaagttctttgatcaaaaacttgtgttattcatctttttttattcttttctccttttgccaaaagaacgaaggactaaccgcctgaattcttttgtgtctctcttctccctttccaagagaattcaaaggaccccgcctgagaattcttttgattcttccctttcccttanacaaaagatctcanaggactaaccgc

SEQ ID NO: 299741 - DNA, 417 bp, Glycine max
  unsure (1)..(417): unsure at all n locations
tgtaacgtggtcatgttaacaagaaaatcatgggttttcatagattcaaactcttaggttctacgagagcattcacccattgcatgtctacttaaagaaccactttttctttgacctcccaacctttattgacatgccacaaataacagaacatagaggttctttttttttggtatgcatttgctttcagctcatatttgcttttttttttacgatgataggtattacaaaagaatgtaaatctgattctctatgtatctgttactcatattcctggacataatttaaccaaaacactcccccaaatttggaacaaatttgacttgatccataataatgctctcctatagcctaagatacggtgcacatagatagcatttacatttagcttanggttcaatgacacatatcgtcacg

SEQ ID NO: 299742 - DNA, 393 bp, Glycine max
  unsure (1)..(393): unsure at all n locations
agctttgagcaaattgtaatgacaataactntatacacggatgtccggttgagtcccgtaagatatcgagacgctcaaaatttagatccgaagctctgagaaaattgaattgacaataactntatacacggatgtccggttgagtcctgtaatatatcgagacgctgcaaattgaaaacggaagctcgtaggacattcaaacgacaataactttntactcggatgttcgattgaatcgggtaatatatcgagacgatcaaaattgagactagaagctctgagcaaattgagatgacaataactttatacactgatgtgcggctgagtcccgtgatatatcgagacgctcaaaatttagatccgaagctctgagagaattgaattgacaataac

SEQ ID NO: 299743 - DNA, 206 bp, Glycine max
ctcgatatattaccagactcatgcggactttcgtatataaacttattggcaattaaattttctcagagctttggagcaaaattgtgagcgtctcgatatatgactggactcattcacacatccgatgaaaagattattggcgtgagaatatgagacgagcttccgttgtcaatatggaccatctctcgctatattgcgataggcta

SEQ ID NO: 299744 - DNA, 391 bp, Glycine max
agcttcttatccaatgctcatcttggtggtgaagctccttcttccatggcttattccctagtggatggcacctcctctcacctcttcttctttgtcttccgctgcatctccatggtggaaaaccaccattaaaggacctcattgaagctcaaagatccagcctccatagaagccccacaagcaagtttccatcaggttatataagaggtcacatggtgttgtcctagagaattttctcaaaaaccaaaatgtcgacatagttagtttcgagagatctgcaaacaccatgtattcaaatatcatggggtgttggcatgtcgcttagaatttgatgtacattaaaaatgtggctctcttcttttctcaaaatggtgtttcatagttataaatc

SEQ ID NO: 299745 - DNA, 414 bp, Glycine max
  unsure (1)..(414): unsure at all n locations
tgttcggcttaattgtagtttcgaatcgtggagtagttgttatcattatgttttatgcatctttagtagttggggtttgagacgggctcgaagatggaatgttatttataacaacttttactaagttattcacaacctctttaagatcttcaagagttgatttcatatttgagatttcttgacatacctgtgttatagatatgttttgtgtctcatgcataacttttccctctccaacagttgaacactactgcaaaaataacatactacgacagttcttgagtacatttaaagaccattttgaatcatctttgaaaccaacatcgttgaaagtcttgactnttgacgacggttntcaaaanatcgtcttagaaaaaagtatcattntaagacggttcttgattaagaactatc

SEQ ID NO: 299746 - DNA, 394 bp, Glycine max
  unsure (1)..(394): unsure at all n locations
agctttctccatttcatcttcattgtcaaatcctccaaatcttaatccatacagttgaccactcttgctcctctgcgaagatatgaacacatctataaccctccctatttacggaagatcccccacaagttactaacattcatattctttgggaatttagtgaaaaagaatgtagtttcatcacctcccctcccttgatcacctttccgtgctctacccctccactctccatcctctctcattttcctaatgcacttagggacacataaccccttatcaagtaaaacaaattttaaaaatattcttggtttatttagcttcttattctattaggattaattaaatatntaaaattcaataatattctacatatttagctaaagggaactatttt

SEQ ID NO: 299747 - DNA, 424 bp, Glycine max
tgaactatcaggaaggatggtggtctaatttgtagaacttttataattcgacatctagtacgaaccctatggtccgatgaagacacaactcatggtagacttcctggaagaattcgttgggaatgaccaaaccaccccagactggtggagcttctacgttgacggtgcatccaacgtgaaggggagtagggcatgaatcatctttgaaggccctggaaatgtcactctaaagcaagcccttaaatttaacttcaaagcctcaaacaatcaggccgagtacgaggcactcattgcaggtctaaaactagcaacaaaagttggggccataaagctctgatgctacacggactcgcatcttgtccaggggcaggttgccaactgataccagaccaaagagacaatgttgctcaagtactaccacatt

SEQ ID NO: 299748 - DNA, 206 bp, Glycine max
tagctgtttgaatctatatatggtttaaagccagcttctcagcatggggaccttaaggtccatggtataatctgtggataatggtatgatgataaccttatggatcaatgcctataccgcaacgttaaggggagaaacagaggcgtccttggagtgtacgtacatgatattatagttgcaggctatgagcccggtttgctacatga

SEQ ID NO: 299749 - DNA, 130 bp, Glycine max
cgcaagaggattggtagaggggctatcatccaacgcctttatgtcttacatctcaacgacacatcttgattgcaaatacactttacctgtcatcaatttccatacacatgacattgcttacccagacgct

SEQ ID NO: 299750 - DNA, 391 bp, Glycine max
  unsure (1)..(391): unsure at all n locations
agcttatcaagatacgcactgaaatcatttccattgcgtatctaaacaaaatctgttgagatacatagcagaacaagttttgtgttgtatctcgacatgacaaaaattcattntgttgatatacaaaaaatataggtttaaatatgtttttatttcctataaaattaacaagttatgattttaatccttataaaattttttctttagttctaatccttcaaaaagttgaaattttgtttttggcccctacaattatgcaacactcattaattgcttgcatttgacaaaaggtcaagtgaccatcccaagtgacacccactagtgtttatttttttgggttagaccataggtattctccattggaggaaatcctgttcgagatggataggat

SEQ ID NO: 299751 - DNA, 419 bp, Glycine max
tgaacgaatataagagacatcttcttcttcctaggtgattcttgactccatctcattgaagcgcaagtccacttgtaacttcaaagtatcaaacctttcaccaacaaaggtttgaagaccatcgaacctatccaaaatctttgaaagaagagatgaatcttctccaccatgtccttcttcatcaacatgtcgagcaccctttttcacccaagagccatcatgctctttttgataaccaaaggatgcaatgacagaagttcctattagaaaggatctcttgattggaacatagggttcagaatcaagagggatgttaaagtgttgaaggaaaagggtgactacgtgtggatatggcaatggagcattcaatcgcaatgccttatgcatgcgatatctaacaagatgtgcccaatcaattt

SEQ ID NO: 299752 - DNA, 386 bp, Glycine max
  unsure (1)..(386): unsure at all n locations
agcttcccatctctagcatccctcttgaacttcaaatcatactgatggaacttccatatgtacttcaatttcctcagattcctatagaacagagttgtgggtatgttctgaaagtaaatcccaaagtctaggccattctcatgcagagaatcaaagatggttttttgaggatacccttttgctaactgcctcttgatatgacttgttgaaccatgagaggttgctgagtacacaaaaagcctattgggttgtgttggaccaggaattgaagaanaccacctgtcaaaaacagcaaattccttaaccaaagcagcataaatcggcacagagtccggtttaaaccctttcatgacagtctcagagaggttgggagacatagacaatgc

SEQ ID NO: 299753 - DNA, 421 bp, Glycine max
  unsure (1)..(421): unsure at all n locations
tgaactattaggtaaaatcctatccaataatggtcttatttacagaaagtgggtaggggaacttccgcaaaaaaatatagctggtgtaatgggggttgatttggcgtgtaaggattgatcagtgaagcacttcacttgaaaggcttgtacagttgtacttataggtctgattcccactgccaacaatcccacttggtaggttttatttttatggaaatatcactataagctctcattgaggattatgacaatgccctgccttggaatggaatagcctttcctccccttaaaacttttgtttccaaaagaagctgtcgtagattttggacttgtcacttatggtaaagatatttataggtatacatgtgcttaanaggagtntgacttgngattgatgaatgttgtangggttgaaattgca

SEQ ID NO: 299754 - DNA, 380 bp, Glycine max
ttttagtggatgtgatcattaatagtcgctttgaggtttgctaaaatacaaccgattcattctattatgaataatgaatttaaattttacataagaataattatgatagttaaaaacacttataaagagatgattaaaaaaatgtacaaatctagaagataatattaataccatacaagaataatagaatataatatatatatatatatatatatatatatatatatatatatatatatatatatatatatatatatatactgtgtatatatactcaacctcatgcatataccttcattcaaattaaataataacctataacattcgagctgcgaaatctgctgctctcatattggattatgaattctttatctaaacag

SEQ ID NO: 299755 - DNA, 352 bp, Glycine max
aatagtgagaaatataagaactattttaacttctaatttactctgattattgatttattacagtatgggtaaactatgattaactataaagtatgatggaacaaatatgaaaaggcttaccgactactgctgattatgaaataaatacacaacatacatagagtgaaatgagcatatatttcatatgattacaatgacaaataagaccttattcatcagtcatcaccaaatgagcataatcacataaataaatggtcggaaatttgtcttaaattgaaaaggaaaactgtgaggggccacgatcactgtcagctgtggggaatgaataaattcacccattcattcattgatg

SEQ ID NO: 299756 - DNA, 136 bp, Glycine max
tcgtccgtaacgcccaccaatacttatgccagacagctaattttactaatctctgtcattcatccacctcatttcactaactcacgcccaacacacccccggttaaagcgcaccctactaactaactacatgaccg

SEQ ID NO: 299757 - DNA, 167 bp, Glycine max
  unsure (1)..(167): unsure at all n locations
ttctccttacgcatctgtgcggtatttcacaccgcatatggtgcactctcagtacaatctgctctgatgccgcatagttaagccagccccgacacccgccaacacccgctgacgcgaaccccttgcggncgcatcgaatataacattcgataatgtatgctataccn

SEQ ID NO: 299758 - DNA, 291 bp, Glycine max
agcttttgatataacttctaatgtgaatgtgatatgcgtatgcgcctaattaagctatttactctaatgcaccttacatgtaattgtacacatattatttgcctatatttgatgtttggtgtttctttaaatattggtgatccttagtgagcttgaaacattaacgtgcggagtaaaaattgcatttttgtttaatgtttcaacaaaaccttttttttttcatttttttggggggggggggggggtgaacaaacaactgatgaaaatctcctgtgataaactacaaaatcc

SEQ ID NO: 299759 - DNA, 421 bp, Glycine max
agctttggcatctgagaggggtcttcatgctgttattgatggtttctgggtggaaaatcctaatttggttaagcctgaaattctgcagcatttgcaaagcagattcaaattaattgaagttatgtacaagcactggagcttatttaaggcagaaattctacagcatctgcagtctgtgggtggaaaaagggtgggagtggaaatttaaatggagaagacacttgtttgacagagaccttgagatggcagattgtttccgtaatgatgttgctggcaactgtatttacattcacaaaaaggatgagtggatctggaaaatagaccctactggacaatattcggtaattaaaggagagactacaaacaaacacaaatttgatgaggataacggtggcaattaatgacacattatgcccattct

SEQ ID NO: 299760 - DNA, 393 bp, Glycine max
tgtaaccgaggcatgctagacggtctttatatttacaagaaatccttccattgtaagcacaccacatatgaatgagtttatttttggaaatatcatcattaatgataaaaataaagatctatggacatacaaacaccatatatatacgcactgtaaacggccaagactttagctgatacaagtgtcatcttctatactctccctctctttctttatatatatgctgccagattgctcacttcgcaaacaaagaacattaatgtccgcttcatataaacaaactgttcactctgctgctgcttctatggacagttaccaaatctctacattttctcgttactcttcttaccctgtaatcattcttcacggacttccgaacccggacacttttcc

SEQ ID NO: 299761 - DNA, 401 bp, Glycine max
agcttcaaatctagcttttggaagagcttttgttaaaatatctgcactttgatcttcagttctgcagtaaattagtttggcttcaccttctctctgtgcttcccttaaaaaaaaacttgatcttgaaatgcttagtcctgccataaaaaacaggattatttgaaatggaaatagctacttgattatcaacaagaatctgtgtaggctccttttgttccatatgtaaatcagcaagtatacgccttagccaaataacttgattcacaactgcagtggctgtcatatatactgcagtgcttgtagcctttgtccacagcttctttggcaactcctttttatacaacatacaccttgtcatcttcatgatatttctattttcttctctcacttgtaccattcta

SEQ ID NO: 299762 - DNA, 416 bp, Glycine max
tgttgaaactaaggatggaatagtgatgcaccagaagaagttcatttaagattgtttgaagaggttcaacatggatcaatgtaataatgtagatatttccgtggaaggaaatatgatactggatacaggcgatcatgaagcttcagtagatgccacattgttcaagaagctagtgggatgcttgagattcgtctaccatagtagaccagaaatctcatatggatttggtcttggcagcagattcatgagtaatccaaaacagtctcatttggcagcagcaaatagaatcttgagatatctaaaaggaacacttaattatggcatattggttcctcatcagacagaaaaatgtgagctatacctcgtagcttattctgactcatactggtgagggggataagtggagagaagatcta

SEQ ID NO: 299763 - DNA, 401 bp, Glycine max
  unsure (1)..(401): unsure at all n locations
agcttgtagctttcatgacttcagaaaagccaaagatttcccccatcctagttctaaatttcaaatgctatcaaagcttaatttaaaatatgtgtgcactttggaccacaatgtgtgcaatttctgaaatggggttcaatttattataacaaatagtgatgtacataatgtttgtacacatttatatatgtgtggcataatgaattatactcgtaaatgaaatatactggtttaggatttgttttatttctgcataccttagcaaaggaaacaactcttgtaaatttgtcaagttaatatccaaaagctttagctacttgagacgcacgatctgcatatgccaaaaaatattatcgttttctccatcatccaaactnttcagttttcctcctgttatattt

SEQ ID NO: 299764 - DNA, 423 bp, Glycine max
ctcatcactttcagcaatacattctcccactcaaatagtctccgatgccattcattattatagccaccattctgacccacccgagaatcaacttcactgacaaggatatctttatccatcacaacgagaacaatggccagattttatccttcatggtaatttcacccttccatatatctatccaaaatgcatatatgcaccattccccacctttctaatcatattaactgaaaaccaattcaccggacataatgaattatgattttcccccatcatatccttccaccatataaaagtttgactatgagtcaaactaccttccacatccaatcaatagtcatacctgaaatgtataaaatcaaactatatagtgtgcttatctatagagattctcctcctccacttagctagaaggcttgcatt

SEQ ID NO: 299765 - DNA, 401 bp, Glycine max
agcttatcatatgtagctgagatgattggagttccaacaactagattatgaagaagtgaggtctgcatgtttgatgattaacaaaaaagatttttgttttatcaaagggactagaagcgggtgaacagaaacaggtggagctactagattgctagggaagttatgctaacttgggttgatgagttccttgtattccaaagaggtatttaaagggatggaaactaggaagtgaatctttgacactttctttagtggggcaactcaaccttggatcatcaaccttgattgataaaaatgtactgatatgacaaccgtgacaattattcaagataatattttcacatcatggactgttttgcttgctttaagaaatatggttcggtaaggtttagctttttgag

SEQ ID NO: 299766 - DNA, 430 bp, Glycine max
tacctgagttaattgcctgctttcatgatttccacgtaatagggtaatattagctgggtatctgtgaaattacagaaaaataaaaggatatgtaagttttcaaaagaaaaaaaagaaaagcaccactgcaaatgggtgtaaactttccaaagtcaaatatgctagcaatgaaagactgtttggaagtatcataagcatttattgtaagattgttgacttttataatacttacttttaaagttatatcaagcacaatttctaatgggctgacagtgtaaaaatcttcacactgaccgtttagcaaacttatacactttgataccatgggatacaaaccaaattaatcttaaaactcttcttacatgcctccaaagctaggacaaatttcaagtgataatcttattaacaatacatgtaaagccaacaagtc

SEQ ID NO: 299767 - DNA, 329 bp, Glycine max
aaatcagccattattgaaccattatgaactctccaaccaccgggaccatctccggtggaagaatcattccaaacaacagcaacaacaatcttattttcaaaatgctattggcccaagcagaacatacatttcttcaccaatccagcaacaacaacagcaaccgccccagaaacagcaaacaggtgaagctccttcgcaaccttcccttgaagaacttgtgaggcaaatgactatgccaaacatgcagtttcaacaagagaccagagccttcattcaaagcttaactaatcagatgggacacatggctacacagttaaatcaacaacagt

SEQ ID NO: 299768 - DNA, 315 bp, Glycine max
  unsure (1)..(315): unsure at all n locations
ccttgtccgaaaagtcacttanaaccattttaaggtccaacgccttanaacggtcctctttgcttttatcgattaacatggaccgttcaaaagcataagatcaacacataactttaccgcttttgcaagaactatgtaggtctgagttcctcatcacanatcgaggatacgtangagcaaaagccccgcttttgtcgaccaccccaagagatcgttaatggtccaacgccttaacgtttctctcctttcaaaaaccaagagatcgttaatggtccaacgccttaacgtttctcttctttcaaaatcaaaagatca

SEQ ID NO: 299769 - DNA, 392 bp, Glycine max
tagcttgtgaagatgcttcaatggaggaaaagaaagagggagagaaagagagaggggggagcacgaaattgaaggaagaaaaagggagagaagttgaactttgagttgtgtctcacaagactctcattcatcaaagttaccacaagtgttacacatgcttctatttatagactaggtagcttccttgagaagctttcttgagaaaccttccttgagaagcttctttgagaaaacttccttgagaagctagagcttatctacacacacccctctcataactaagctcacctccttgagaagcttctttaagaagattcctaaagaagctagagcttagctacacatacctctcttatagctaagctcacctccttgagatgagaagctagagc

SEQ ID NO: 299770 - DNA, 413 bp, Glycine max
  unsure (1)..(413): unsure at all n locations
tcagaccaaggcaactcanaatctaggtatctaaaacccctcaatttagtggatttcaacgtttaagaagtgaaaatgagaatggggtaaatttggagcaaactctcacctcacacaagtctataacattaatctaaacttgctcaaactggttctacacctaaaattccaccgaatcaaaatttgactcctcaacacccaattttaccctagaaatgacccttgttttcactttggtcactcatactcctcatttgcacagtctaagctttctcttaagtcctaaatgacatttcaaactaagattaactcactttaacccccaattaccactgaatccagatttagccttccaactctcaaagcctcactctttttccactcataacaccacattctcactttctaaccct

SEQ ID NO: 299771 - DNA, 285 bp, Glycine max
cacttcttatgctcaaagaagaatcacctcgatcagaaagaactacgcaggtctgattttctcatcccaattgaggaatacgtatgagcatagggaaacacccttgtcgacctcgctaagagaaactatatacaacgggtataaaggatataaatacatacaacgggaacataaaaaatcaaagtcacgtttgcacattcgattaaaggttgccgtcccttgcgacggacgtgtggggtgctaataccttctccgtgcgtaaatacaactcccgaacctttcact

SEQ ID NO: 299772 - DNA, 476 bp, Glycine max
  unsure (1)..(476): unsure at all n locations
cggcgccatgaccccnattgagtccctgcattacgtgacacttaaatactaagcttggggagtctcgcgccccaccacatgatggtggttggtgtctgtcggagcatcgggctcatggaggaatcctcctgacgggcacagcgcggactggctgctatttgcagccgcctatctactaatgagcccaccctgcctttacttggcgattcttttttggtctatgaacacgcaactcaccaatttcctaccagacttgcgaactttccataatgtcaccgtaccttgcggactaactaattcatcccatattgacttacagagggttacgaaaccgtcctaactgcgcaccgaagcacacatttgattacccgtggaccccagtaccataccgattgtgcagcaagataaccgtttgatctactgcacgtaccggaagctcacatatagtcttatgaccggcggcaagaacctcgcan

SEQ ID NO: 299773 - DNA, 321 bp, Glycine max
agcttgtacgccaaatcgtgactggccatatcccttgaccgatggagagattgcacttccttgccctctgatgcattaccctagtcgaggggaatttggcgagcgaagacaaatactcagaagctttgcaatgcatgctacacaagagacgatggaaccctgggtcatctaggattgtctgagagcattcaaaggatcttattcgagactacccgatcaagtactgtgagagggggaaatgaatagaggagacaatttccattaccctagtgtagttgtatacaggcagacgacgaatgacctacagctcctgatcacgat

SEQ ID NO: 299774 - DNA, 407 bp, Glycine max
gtgagaatgtgtctgaagaagcacacgatgttagacgacctttacatctctggaatcccaatgcggactctttcagccactttccactattgcatagttcctacctccaatatcaacatcatgactgctttatcttatgcttacagcaaattgcatctcaccgagaccattctccaaccgagaatacccatgtgtatgagattcctccagccacaatccatccagagatctggccctccacactgtgcattaagagtgacattatgaactgattgccgacttccaacgggatgtgtccaacgagcctacctgatgggtgattacataacctatgaattaaatatgtctaggctgactacctatttggctccctgtatgacattgtgatggtgtagttgctaacaaat

SEQ ID NO: 299775 - DNA, 269 bp, Glycine max
gcgctctggacaacaccgaaaacacccggatatgcagtggtcaaacgaaaaacaagaaaagcaccactgcagacgggtgcaaactttacacattcaaatgtgctaccaatgcaagaccgattggacgaatcataaacatttattgaccgatggccgactcttataacacacacttttaaagtcatcataagcgccatcccgaacgggccgacacagtaaaaggctccacactgaccgactagcagactaatacgctacgataccatggg

SEQ ID NO: 299776 - DNA, 377 bp, Glycine max
agctttttgaactaggatgtgttagatcacccaataacgcggccacatacacagcttctagctattcgtaggacatttcaaggcccgtatccacatgtcaatgttacacggtgatgtttttaccataaaatcaaacctcattgctaactattataaatatggcgagagtaacttaaaacatttattgttgcctcatcttaataccaatctactctcgattttgctatatacgtttggatgatgattgtttcctagagattttgatgtctattcttatagattttaaattcctcatatcatattgagaattggccttggcatcgtgtgatgtgccccatgcagcagcaacttctgttttactcatacttcttactata

SEQ ID NO: 299777 - DNA, 601 bp, Glycine max
  unsure (1)..(601): unsure at all n locations
cctcccgcatctccgnctcgctccccnnctaanntntccctctctcntctatactctcgctccttcctccgcanncntnanntaaannnnnntananncagcnaccnacgggacantttggaaacccttggtagatttgcagtacgactagccanancngngacactatannaaactcaagcttggccactttcatccagaactggtaggctcanatcttcttctgtctacctcgacgacgagaaccagatcctcctcgtcatcggagaccacacaagcatgcaagtaaaaggagaatatattctaacaatagagcacgtacatcgatgcacaactctacactatcacanattatgataggacgataatgccggaagagtctctgcaatgagttatccttgcaaacgcatacgtacacaagaattccacaaagttgacaccttaggtgtataacactcaacactgagtacaagaggacctactcgttaccatgtggggcctcctatgttatggaaactcggtgagcaccacccagagggcgtgccatacacttacaggtaaccttacccagcctgcccggaatgtctgtcctaggaacgcn

SEQ ID NO: 299778 - DNA, 384 bp, Glycine max
  unsure (1)..(384): unsure at all n locations
agcttgtccacaaaaataggttnttgaagtttgtcatttcaatttctcactaagtaaaatggatcattttcaaggtccaacgccttaaaatgatcacttcttaagtaaaaaagaatcacttgataagaaagaactacgtaggtctgattttctcatcccaattgaggaatacgtaggagcaaagggaaacacccttgtcgaccacaaaaagagaaaaaatataaaaagggtataaaggatataaagacataaaaagggaacataaaaaatcaaagtcacgtttgcacattcgattaaaggttgccgtcccttgggacggacgtgtggagtgctaataccttccccgtgcgtaaatacaactcccgaacctttcacttaaaagtt

SEQ ID NO: 299779 - DNA, 366 bp, Glycine max
tgccacccagctcgcccaggcgagcagggttgcttcctccagaagcaacagccttctggaggaatcttccggagggcccaagtgggcctggttgctatttgcacccccatttttactaagtacaccccctgcctttttttggtgattcttttttggtaaagttacggaaacttacgaatttcgtaacgatacttgttttctttccataatgttacggaaccttgcggattacataatcatcccctttttgacttacggaatgttacgaaacctcactaattgtgcaacgatgcttccatttgatttccggtgtgtcacggaaccttacggattgtgcatcaatattttcttttgttttccggcatg

SEQ ID NO: 299780 - DNA, 381 bp, Glycine max
agctttgtgtggagcttcaatggtgaatgagggaggaagaaaagcaacgtgagggagagggagagagagcttctgaaaatgtggggctgagtgaggagagagagggttgctttttggtttaaataaaagggttttctctttttctattattttatttaagcaatgccacatgtctccatttgagtggagcaagaagggcccactttctctttttgactgtgacccatattcagtcacaaaagtgagaaaaatctgacctttgaaacgctaaaatcctgcctcggtttgcgtgccgtttctttgattccagtttctcgcgtttctctgcgtccgccggggccagttttcgaaagcaagcaatatatatatcaaaacgctcag

SEQ ID NO: 299781 - DNA, 439 bp, Glycine max
tataaaactcagctttacatggatgtccgattcggtgacataatatatcgagacgctcgaaatcgaacaacggaagctctcgataaattcgaatggtcataacatttcactcggatgtccgattcggggacataatatatcgagacactcgaaattgaacaacggaagctctcatgatattcgaatgctcataacatttcacacggatgtccgattcggggacataacttatctagacgctcgaaattgaacaacggaagctctcgagaaattcgaatggtcataagatttcacacgaatgttcgattcggggacataatatatcgatacgctcgaaattgaacaaccgaagctctctagaaattcgaatggtcataacatttcactcggatgttcgaatcggggacataatatatcgagacgctcgaaattgaacaac

SEQ ID NO: 299782 - DNA, 159 bp, Glycine max
ataaacatatatagctcatatatatattcttctcgcatgaggaacactggctctaatcctcacttggctatcttgaagatcggccccttttgccatgtctgattgctctatcaccataactgcctgctatgaagcccatagtcttcaaatggactcgaa

SEQ ID NO: 299783 - DNA, 325 bp, Glycine max
gatgatactgctaactctataattataaatcatgcttttgtattctaatatatttcacttcctgtatgctgcgcaaaatctcattcttactggtgtcaagtttcagaccttgcatgatgatgggactgtggaactatgggatatatccggtagctttgtgttttcagaaaatgatgttgggaaaatcatggcagcaacttctgttagtaactgcaagagctcacaatgcagtggttgtacaaagcttgactactcagctgactaatgagcacctttccaattttcaagtacctacttcctctgtctaatcttccctttcttttaa

SEQ ID NO: 299784 - DNA, 435 bp, Glycine max
  unsure (1)..(435): unsure at all n locations
agctcacattttnctttattctgnnnctttnggagctgncaaatgattggttgtaatccttttatgtagttatgtactatgcataatgccaaaggacaagtcatactattcagttttcaaaaggaataaccttaaacgtgcatcctatattgcattgnggtggggtggttaagtaggaaagagaaacataataaatacaaaaatatgataaagggatataatgaaataaaaaatgttaatacacattnttatgtatttttattattgattaaaatttattanaacgttagagattctatntattgttaaatgtatntaactcataattctattattnttaanaagttttaattaacaataaagaatattttaaaataatatatggatctttnttcacaataacaacaatgaaattcanacttaanatttcatgct

SEQ ID NO: 299785 - DNA, 414 bp, Glycine max
  unsure (1)..(414): unsure at all n locations
ttgaaaatataatatcttgatttctaaaatacccattgtctctccctctttgtaaacatcaaaaaggccaaagtgcgcaaaacatgaataatttaatcatacacaaagcataatttgtaaaacaaacatataagattctgatacatacataaagaaaaacatgaataaaaccaaattgaaatgcaaaccacttagtcatataacacanaccataaatatcatgttcagtcatactaagcaaatattaaaagaaatactaagttttcaaatgtcataataatatagccaaatacacggctagaaaacaaaatactaataataatagtaatgtctaaactgatagtggtggtggagggaaattaatgtagtcacgaatgatggtgaaatcttcttcaacctttgtgatccttgagt

SEQ ID NO: 299786 - DNA, 262 bp, Glycine max
  unsure (1)..(262): unsure at all n locations
ttacagcagatactagtagtgacccactaacctacaattaacatttctgaatgtccttaacctangggattagaactaacttaatggctgaatgatactgaaattgctggcgaccaaatgtcacccccttcagcaacctgtaggcaccatttggtctccctaaatgctgatgcctacgttgccaattgagcccttaatacaacttgaactaatgcccttgtagttgattaacccataacatacttttggtcagccaacttta

SEQ ID NO: 299787 - DNA, 159 bp, Glycine max
  unsure (1)..(159): unsure at all n locations
ctgcaagctgatctgcctcttgtaaaagtatgacctttgaattctcggagcttcgttgtcaatttcagcgtctgatatgtgaacncctgaatcaacatccgtgtgaaagtatgaccattgaattctcaaagcttcttggtcaattccacatctcacata

SEQ ID NO: 299788 - DNA, 377 bp, Glycine max
  unsure (1)..(377): unsure at all n locations
tcctcggtgccatttcctacgaaggcaaacattggaaagtagttttaccaagaaatgctactcttaaaacaaaaatggcatacaacctnctncaataaacacaaacatcgatgtaaatttaaaagcaacttatgcacatacttttttaccaacggtcacttgcaccagacatcttataactaaaaaaaatgcacccatgtacaatcaaggcacctttcgtacctagattattcatatgtacttgccaagtgtatntgctacctacatcacatgcactttctttgctaaaatacatacatgcatactcaaagcatttggggtaccaaaaatgcacatgtgcacattccgtatttctaatacttatgcatatacaaact

SEQ ID NO: 299789 - DNA, 460 bp, Glycine max
  unsure (1)..(460): unsure at all n locations
agctttgtgttgatttctgattttcatgcaaaatctanattagtagatgaaaaaccagtctagaagggtaatctaatttcagatcatgtggtaaaatctgccataacaactntggggacaggagtcaatcccctttcgaatactatatcacaaattaaagttgctcaagtaaaaaatgatacatataccaagccagtagttagctctttgagaaaaccatccatttctaccaatttaccttctgacccaaaggttcattcttatattccttatgtatctaccatagttagttggaactaganaaagagcaaattgtcaccagcaatgactactattgatcatgatctaacataatatatagtagcacagtgtanaacaccaaagaggatatcatgcttgccaccgaggactacatacatgactcacnaacatttannaattcagaaacattgacaataat

SEQ ID NO: 299790 - DNA, 418 bp, Glycine max
aatcttatccaatatatgatatgtgccatgatacgaaccatattactatagtgagatggtagtgactacgatgatagtgacaatggtggtgatagttacactgacaataatggtgatgacactagtagcgatagttacagtaacaataatggtggtgacattagtagtgatgatggctgcgacaacgacaatggtaatgagtgatagcagcgataatggtggtgtttcttatggcgacaatggtggtggtgatgatggtggtaatgatggtggtgacaatagtagtaatggtgatggttaggatggtgacaatgatgacgacaatgatagtgatgagtggtgagacactggtggtgactatgatggatatgatggtggagacaattgacgagtgacaatgatgtgatggggttattat

SEQ ID NO: 299791 - DNA, 344 bp, Glycine max
gttgcctattgctgtctcggtaaaagcactctcatgtattcgttaaccgttgaatcttctcgaaagtggtttggaggttcataagacagatgtgcacgatctgaccattgcgatttgcgatatgacttgcggtgtgtgagacacacttgagtgtttcaagtcttattttcatgtagccttgaaaaacagccattcctttctacttctttcttgccaaacccttccccaacatcccaagcttcttctttaccacccacaaccaccagtagccaccacaaactgccatagttctccattgaaacctcacaccgagaggaacccttcaatcggagtggatcttctaa

SEQ ID NO: 299792 - DNA, 249 bp, Glycine max
  unsure (1)..(249): unsure at all n locations
tgccctaagcacaagaaataaaaacatgttacgagactggccctgactttctcgtgctactagagtactcatgctgagacagcgctttttaagccaatgattgaattacgatggtcacaatcaattatgctcacactgtcacacatatgcgattatatgttgacacaaaaaaatagcatcaattctgcacagcttgcttcctgaattatggcaagccatangagtggcaacgggcagataaataatagc

SEQ ID NO: 299793 - DNA, 439 bp, Glycine max
  unsure (1)..(439): unsure at all n locations
tggaacanatatattgagctcttggtccccttagagattgtgtaaatatgtctcctactttatcattagaactaacgaattcagtaataacttccttagaaagaactttctcctggacaaaatgacaatcaatctcaatatgtttaattctctcatggaatactggattaaaagctatatgtacggctgcctgattatcacagcatagcttcatttgttgagtatctccaaacttcaattcttcgaagaagttgtttaatccanatgagctcacaagtggctacagccatagctctatattcagcctctgcactagacctttgcacaacatttgcttcttactctttcatgagacaagaatttctccaacagacacacaatatgttgaagtggacgcctatcnatggtgatcctgccatctgcttgcaaatccactatt

SEQ ID NO: 299794 - DNA, 342 bp, Glycine max
  unsure (1)..(342): unsure at all n locations
tccgtgcgagatacatttctttatgaatacattatttctaaaatcccaacagtgagaatgtgcaaaaatgacttccacaggtggtgcccaaatttcatgagaatccaacggttaacgagtctacgatcgtaattctactaagacaagtttgggtatatgcggaaaagagagaggttttgggagaagaagaagaaagaatgaacttgcgaggagcananagcatagagacgtatcctaaatgtaaaactgacctagtatgtctctatttatagttagggtactcttagcctattatttactttattatttttttacaaacatacttctatcttactttttcat

SEQ ID NO: 299795 - DNA, 338 bp, Glycine max
taacaagatgagttgccaacagagagagtcaatgaataattacctatcgaaataaatttccttctttcctttaaagacgatgatttgtcttcgcacaccacaagatgcttttgctttcaaagagaatctccataagccttaatagtcactctcaaggggccgctgaaaattgctaattagatagcattatttatcaaaatacatgtaattaactatgagttacataaatttctagtcatttaatttttttcaacattaatttctctttctttatgatcccttggccatcccaattttttaagggaggattgctttccacacctggggaaaaaaaaagg

SEQ ID NO: 299796 - DNA, 369 bp, Glycine max
  unsure (1)..(369): unsure at all n locations
agctttaagataagtgtaagaganaagatagcagcctcaatgtnggtgaaactggagtccttgcatatgacagagtcccttgcaaatcggctatgcttaaagcaacaactgtacaccttcaagatgacagaatcaagaatagtcactgagcaatcggccgatttcaattagatccttgatgatttggaaaatatggaagtaaagctggaagatgaggataaagctcttttgcttttgaattccttaccaaaatcctttgaacatttcaaggattcaattatctatggcaaagatcaagacattaccctanaagaagtccatgcctcaataaggaccaaggagatgcaaaaacagcaagactcccaatct

SEQ ID NO: 299797 - DNA, 352 bp, Glycine max
  unsure (1)..(352): unsure at all n locations
tgcacaacaagtaaatctattnttgtacaaaatgaagtaactaactgtcacaacctacccttcggcgggagggagacgcatgactcgcgggtgcgtgttccaagaaagatatacgcgcggagtcgccaccaacgttcatttaaggaaaatgtcggaaaaaccggaaaagacgtgatctacaaactctaagtgaaaggttcgggagttgtatttacgcacggtgaaggtattagcaccccacgcatccgtcacaagagacggtaacctctaatcaaatgtgcaaatatgacttcaattatatttatttccctttctacgttcttatgtctgtttattccttttatgtattatc

SEQ ID NO: 299798 - DNA, 486 bp, Glycine max
  unsure (1)..(486): unsure at all n locations
gacgagatgaacattgtggaccctttgatcacgcgacacatanatactcagccttgactaacagagtcgncncntccttgttttctntgaacttgttctatatctcacctgtactccctctattgccaccgtacttggaacacggctatgttgcttactacgatgtggagcttgatcctcaatatcttccaatctatccccaggatcgggtgttaacactactcatacccattccaaatccctgaaatgtcctgaacctgatgcaacaaaaacacactccccatgaatcgaaacccaacgatcactgccaccgtgtacatccgccaattaaatgttcttcgtgctgacctttaactgcaatcccacatcacaatgtcaacctgacaattgtgatcttggctacaaatcatgagccgtcgcctgttcaatagaacgaccttcgaacctgacatctatcgagcctatctgaaaactctgcgctgcact

SEQ ID NO: 299799 - DNA, 294 bp, Glycine max
cttcatcaatggagtcctttgcttcttgaagatcaatgacagtggaatgcaaaaggaggaaaggtgattggagatgccacttcaaggagaagagagtcaagaacaagttcaccaccatatgaagccatggataagagcttgaaagttggagaaaatgagtggagggagagggagagaatgggcacgaaatttatgcctcgaatgaagtctaaaatttgaagtgtaatttctcaaatgatcaaagtagaaataatgcacacaaaaagcctctatttatagcctaagtgtcacatg

SEQ ID NO: 299800 - DNA, 490 bp, Glycine max
  unsure (1)..(490): unsure at all n locations
tatgaaccctgttganacccttgttgaaaccattggatancctctcnanatnggcaccnttggtggggatcttggtgccgattattgtagaggctttatgacctatcttaagatttgacactgacgatttcgaattttactttcctgaacatagcgttgtacatgctgtttcggcaccaagacccactgggataagtcgctcatgggacacgggatctaagtccttttgttaggtctgcctgagttttactgcctgactcttttctttcaagatattctcggtcttaatctagtcaaagtgcctgttaccacatgaactgacccttgagtacacccattgttatgatatccccacttgagctatatacctggcacacacacctatatttcttcatctccatggagaacgagccactgctacgacatcataatggttagatagactcccatatcggttcaactggcatatgcattttctagccactcttcg

SEQ ID NO: 299801 - DNA, 237 bp, Glycine max
  unsure (1)..(237): unsure at all n locations
tgctatttgcacccccatttttactaagtacacccccctctgcttgtttttggtgattcttttttcgtaaagttacggaaacttacgaatttcgtaacgatacttgttttctttccgtaatgttacggaaccttgcggattacataatcatcccctttttgacttacggaatgttacggaacctcacttaattatgcaacgaatgcttcattngatttccggtgtgtcacggaaact

SEQ ID NO: 299802 - DNA, 128 bp, Glycine max
tgagcttatctacacacactcttcatataactaagctcacctccttgagaagcgtgcttgagaagaatcctgaagaagcttgagcttatctacacacactccctatcttagctaagctcaccccatgc

SEQ ID NO: 299803 - DNA, 426 bp, Glycine max
  unsure (1)..(426): unsure at all n locations
agcnnagantttcaantttatntacngaancagnngaggaancttgggcattatctttccaagtgatatattctttctttcctttcttatctttgaaaggtttcttgtcagaattttccatttttcttctaaagataggacaatcaactctcaggtgcctaggttgatcgcattcatagcattntggaactgaggaggaatcttctcccttcttctttggattgaggttcaatctcattcgatttcctttgttcctcagaannatatttaatccttttacaaagagactganatcatcatcttcttctaaattatttttttcattcaagtcttctttgccactttcttcatgaatagaagatgaggttntgaatganattcctttcttctttcnttcattctcttcatgttgggtgagttcataag

SEQ ID NO: 299804 - DNA, 432 bp, Glycine max
  unsure (1)..(432): unsure at all n locations
tgcatgatttacatctccctctntctcaagcaaattcttcttgatatcatcaaaatcttcatgatttattaaagaatttgaaaataaagattttgaattattttgtgatgaacatggtattgaacataatttttctgcaccaagaactcctcaacaaaatggagttgttgagaggaaaaataggtcattggaagaaattgcaagaactttattaaatgatacttctcttncaagtatttttgggctgaagctgtcaatactgcatgttacatcatgaatagagccttgataagacctattntaaagaanaccccatatgagttatttaacggtagaaaacctaatatttctcatctacatgtttttgggtgcaaagtgcttgtacttaataatggtaaagataatctangaaaattcgatgcanaatctgat

SEQ ID NO: 299805 - DNA, 418 bp, Glycine max
  unsure (1)..(418): unsure at all n locations
agccttnctgataccagttaccacttcacgcanagaanacgaaaggaagaagaacgcgacttangtgaggtcaggggtgaggaaggagaccgaaaccacttcacgcaagcaaaaagaaaaaaaatggtgagggatcacgaggaagaagaaggccaacgcgggagggagggaaggagagagatgaaccatttatttttaaaataaaaaaaattaagccaggtgtacaaaggtatttttgcgtcaactgttgagtgcaccaacaaaaatgttgggtgcacctagcagcactcgccagtgtacaaacatgagaccaacatanaggatatccagttcacgagtncaacatccaagttctctttgttggttccgagtgttatgccctagtgcccaaaaaactntccaatatctcatatactcc

SEQ ID NO: 299806 - DNA, 371 bp, Glycine max
  unsure (1)..(371): unsure at all n locations
catttatctcatcccattcaacctaaacatttcataaaagtgaacatcataatcaaagcttanatattcaaactaggaagaaaaattattcaattcaagattaagaaaattctctaggataaaaatcattntatgaagggacatatcanagcaaaacatgagtgcatgtaccacaaagttgaaagaattgacaccatagatttagttatccatattccacaataagttgcctggttcanaaagcacttcaagacacaattagccaaagaaatttaatattntgttgcaagaataattttttaaataaaagtagctacagtacaagtttatgaacatctatcacaacttataccaagaaattcttgataatg

SEQ ID NO: 299807 - DNA, 429 bp, Glycine max
  unsure (1)..(429): unsure at all n locations
agcttaaggtttgngattctattatanancacttcatcacttgcttggtgaagatcatcaagccggtgccatgcaatttcctgcaggttacacaatttctcagtattttgataacctggcagtggcaatcacatatagagtaatttaccatgatctttaacataagaacaaagaaaagcaatcatgttgaaagttctcagccacaacacactcaactggaggtgcaaggaaaaaacagtaaagaccanatatagatccaaaattcagagtaaaaaagattcaaattagtggaaactctggttttcctttagtttctctgtnttttgaaattgacttatcatcccaggattgtacttttacattctactctaaagaagatatcctagactaaactactatatangagataattaaagataactcttagta

SEQ ID NO: 299808 - DNA, 413 bp, Glycine max
  unsure (1)..(413): unsure at all n locations
tgtcaaagaatccaacctctcatggtagaagcaaacacatagaaacaagatttcactatcttagggatcaagtgaacaaagagaaactgaaagtggagtactgctacacatttgatcaacttgctgatattttaaccaaacccctcaaaggggagaggtttaaaaatgtaaggggcataattggcttgatgaacttangagatcagaataagggagggtgtgagagtttaattnttgtttgtgtggggtagaattgtttgtgctttgaatataagagagagtaacagaatttttaaattcttgtataagtactagcctaagtgtgagnggttatttactctgttttgcttgtataaanggcatacatacatcttaataaagaggatttattcattctatcattttcagtctct

SEQ ID NO: 299809 - DNA, 402 bp, Glycine max
  unsure (1)..(402): unsure at all n locations
agctntgagttanaatttgactcaccatanaccttgacccagcgtgagaatgccaatccttaccctcggaagcaaaaaaagaatagaggggaaatttccaatcacagaanaagagaaggaaaatttccaatgaaagcaaaaaagacatgaaggaaaattccccaatcatagagtgngagaaagcaaanaaaggataagaaggaaaattccccaatcaaagagtgggagaaagcaaatagatgagaaaggaanattcccaatcanagaatgggagaaagtaaaaaaggaagaagaagaatgacagaaagctcctgatcaaggatcgaaagaaaccagaagaaatgtgcagagaggtctttggaccagacaatatctgaacagtacagaattgtcaccaaatga

SEQ ID NO: 299810 - DNA, 357 bp, Glycine max
  unsure (1)..(357): unsure at all n locations
tgtaaatatttattggtataatttgcctgttccattaggctcttaatgtctttagaggttacttcctcgttaacatcttttgtcttgaatggaattgccatgacaggtttattggtactgtctttgatatttggtagttgatattgtgttgcgggaagtaattccgattggattaactcaccatccttcacttgccaatttgctatgacattttgtgttgaatcacctatgatgtcttgtttccaagggtaatctatatcctttctgatggcataagcatgaaaccaatcaaagaanaagacattaattttgactcttttcgacaaatcgtagaacttgtcttggatttgttctctg

SEQ ID NO: 299811 - DNA, 444 bp, Glycine max
  unsure (1)..(444): unsure at all n locations
cctacttgactaggcgacaatggtgaaacagttctcacagactcagactcgacagggaatgtgaaagacaatgtggcattccagagcagtccattattactgtatgatcatgacttcagcccttacataatctgagctcatggtttgctcttgtcactgatgacggagaagtcaccggaccctacccttactgtgtcatgcctttgattataggattgatgagatacagcagggcctgggtaatcacgtccgattcatgtgctcgagctggcacagaatcaagatatcagaggtaggctgccaccgccattgctgcattgtaacctttattcagttgggctactgccaagacatgtgcccttatcaacattagaacgctgcatattcgagattgttctctctgcacccgtcgaatctgttgacactgagaagactgtggataan

SEQ ID NO: 299812 - DNA, 444 bp, Glycine max
  unsure (1)..(444): unsure at all n locations
aatttgttatcaataccttaaactaataacttatgacattacaacatgcaaagttggaacgttccaactcatggcaaccgtaaaagagcaaaaagcaactcaaagatgcgttgattgtcaacagaattaatggcaaaagcaaatttgagtttggtagtgactccttgctttggcacaaattttatcaggatagtccttccaagaaagatatgaatcagggcaatcttatggtctttttgcatgattcatctgtttcgcataatgaacatcaccgtatatttaatgtatatggagaaatcaaagaggtgagtttggcttaccaattgtttgttgcacaaagattgatctgaataatttatgtgtggntgactaactgtcttgagtttctgttcatcaatttctttggtacactttnntgtgtaatctttgctggaggatgacaca

SEQ ID NO: 299813 - DNA, 303 bp, Glycine max
  unsure (1)..(303): unsure at all n locations
tgaaattgatcaacggaagctctcgagatattcanatggtcatatcttttgacaagaaggtcagattcaggcacataatatatcgagacgctcgaaattaaatagcggaagctgtcgagatattcanatgctcattacttttcactcggaggtccgagtcgagcgcataatatatcgagatgctcgaaattgaacaacggaagctctcgagaaattcacatggtcataactgttgacacggaggtcagcttcacgcgcataatatattgagacgctcgatattgaacaacagaagctctcgag

SEQ ID NO: 299814 - DNA, 517 bp, Glycine max
  unsure (1)..(517): unsure at all n locations
tgatgttcattgcatgcnggcgaatcactcgacccgggatctgtgagtcgactgaggcatgcaagcttancttttagttctctgcanaggnanccaagccgnagagaaaaagaagagagaatggaggcacaacnnnactggcgacgagcgagatacagcagcngacgaacacagnactnctaaaatcccgacagggagaatgtgcgataatgactttcaaaggaggtgcccaagtttcacgaaaatccaacggctcacgagtctacgagcgtaattctactaagacaagtgagcgtatatgcggaacagagagaggctctgtgagaagatgaacagagattgaactgggaggagcaaagagcatacagacgtatcctaaagggaaaactgagctagtatgtctctatctagtaggaggagactctgagcctattatngatgatactattactctcacagaatactcctattatactctgtcgtcaatgnagaacacagtagaacattcatgtatttg

SEQ ID NO: 299815 - DNA, 391 bp, Glycine max
  unsure (1)..(391): unsure at all n locations
tatgcatccaataccctgatgaggatgtcccatatgttcttaaaactggactgattcatttgcttccaaagtttcatggccttgcaagtgaagacccgcacaaacatttgaaagaatttcacattgtctgctcaaccatgaaacccccagatgtccaagaggatcacatatttctgaaggcttttcctcattcattagagggagtggcaaaagactggctgtattaccttgctccaaggtccatcacgagctgggatgaccttaagagagtattcttagaaaaaattnntcctgcttccaggaccacagccatcangaaggatatctcaggtattagacaactcagtggagagagcctgtatgagtactgggagagattaagaaactatgt

SEQ ID NO: 299816 - DNA, 363 bp, Glycine max
  unsure (1)..(363): unsure at all n locations
aaataagccctccatcagtgggaccttaagcttcattggataatttcttcatttggttatgatgaaaaccccatggatcaatgcatataccacaaggtcaatgagagtaaaatatgttttcttgtttcatatgtagatgatattntacttgcagtcaataatcagggtttgctaaatgaggtgaaacaatttctctctaagaattttgacatgaaggatatgggtgatgtatcttatgtcattgacattaatattcatagagataaacctcgaggtattgtaggtctatcacatgaaatctatattaacaacaatttagagagatttangatganagaatgctcaccaagtgtcgctcccatt

SEQ ID NO: 299817 - DNA, 400 bp, Glycine max
  unsure (1)..(400): unsure at all n locations
ggacctatgaaactcagctttacatatttntttcaggagatagttgtaaaaatatntatgcaaaaggtgataattgnccatgtattgcattgctcttagctcaacattcatccaatgaggggtattgtgagaagagtgaaaaaacgcggttttgtagattaaaacaaatgccattggagctaacgtggaaagacanagaaattaacaattgcatataaaaagggggtttctggtggtagacaatattgtaagagaatagtgttggaggaaaataccttaatttgaagtaaacatggtatccaacctgtggccaactcgatgcttttttgaggaatgtgctctcgctgctcagctgcaactgtgccttactattactaacaggtcaatttgatgatggaca

SEQ ID NO: 299818 - DNA, 380 bp, Glycine max
  unsure (1)..(380): unsure at all n locations
agctttgaatttactattcaatggagttgacaagaacatcttcagactgatcaacacttgcacagtggccanagatgcatgggagatcctgaaaatcactcatgaaggaacctccaaagtgaagatttccagattgcaactcttggctacaaaattcgaacatctgaagatgaaggaggaagagtgtattcatgacttccacatgaacattcttgacattgccaatgcttgcactgccttgngagagaggataacagatgaaaagctggtgagaaagatcctcagatccttgcctaagagatttgacatganagtcactgcaatagaggaggcccaagacattngcaacatgagagtagatgaactcattggttctcttc

SEQ ID NO: 299819 - DNA, 409 bp, Glycine max
  unsure (1)..(409): unsure at all n locations
agcttatgagttatctaatcaagattcttgattgctcttaaagttgtaacatgtggtctgactagtctccactttctaggtaaacttcgtaagattttatcaacatgatcataattatcataatgtatacctagagagcggagctcgttcagaatgatttggaagtttccaaacatggtttgaatatcttctccctcttccatattaaagagttcatacttatgtgtcagaaggctcaacttgttacgttntacgttagaggacccttcgtaggtaatggataaggtatcccacatttgtttggcgcttttgaagttgtgaactttggaatattcttgcgcgttagttgataagaaatatagacttatgatcatccatccatttgtccttggggatcttgttcttctga

SEQ ID NO: 299820 - DNA, 320 bp, Glycine max
  unsure (1)..(320): unsure at all n locations
tccttgagaggcttctttgagaagctagagtcttaactatccacacccctctaataactaaactaacctccttgaaaataaaacatggataaaataacacaacaaataaaatcaaacatcaattataattgctaataatatttcaaggtgttacagcttgtccaaagtagccttgggcatgatgttgagggaagagccattgtcgataagcactttggccactatgtggtgatggaagcttgcttgtggagcttctatggaggctggatctttgagcttcaatgaggtccttcaatggtgattntacaccatggagatgc

SEQ ID NO: 299821 - DNA, 373 bp, Glycine max
  unsure (1)..(373): unsure at all n locations
taagcttattcttttgacagnntattatcatgcacaacctgcaagaagtggctcataacaggccaatcataactatggagcattttcttgagcaagtagcctggcctgaagctcaacttccattggtgagacccaacgaggctactccgcctgagcccacctgtgcaggttgatccagagccaactaacccacaatctctagtggtaaatccactatcttctcttgagcgtgaagtagttcccccatctccacctctgattatcatctccgatgcatcatctgatgaagcagctgccccctctgatcaccanaaggagaaaacagctgaccttctacttcccctagtggaggaanttctgantcgtcatctgg

SEQ ID NO: 299822 - DNA, 393 bp, Glycine max
  unsure (1)..(393): unsure at all n locations
tgtgacattntcaattctacatataaccctgtaagttagctatctattgatcttattttgtttataggtttctaatttctatcatacgttggttacatatatttatattntattgatgttgcaggtgcacatttgggacttttcaggacagacaacccagttcttcttgaatgacaaatctagattgccaaacgattctcctggtcaacttggaaaagaggtagttggtgattgttaatagattggcacgtgtatcaattntatcacaagtagtaaagattaatatggaagttcaagtatcgaatccacgaggactttggttgtactttagtgattctaacccaattattaagcaatgagaagaagtagaagagaaaatgaattgtaagtgtg

SEQ ID NO: 299823 - DNA, 435 bp, Glycine max
  unsure (1)..(435): unsure at all n locations
ttagcttattactatntcatgnnactatttatgattttgttacttttctttttcatgatgaagttattatcatgtaaactgaacaactctcaacatatctataatgcattaagttattttgtagcaagattttaaccgttttggtgtgtttagtgacacaccagaacatgacattgctaatcattaaaggaaatctcttctaaattgagtaactcactctagagggtaaagtgagaaatcatagttgttgatgaanaaatcaacaatcagttaggtgcacatatatgacaaatcatggatcttgtggaatattgaannatgaattttagtanatggtctaatttatatttggttcttaatagaaatttggtntatgaagaatctttaataaaataataatttttttttattcttgacacttatntctagttccta

SEQ ID NO: 299824 - DNA, 310 bp, Glycine max
  unsure (1)..(310): unsure at all n locations
ttcttccgtcggtgctcctctcatggggtaccctagttgtcttatagcgagcgcgggattgtagttaatacaacccctcgttcctaccagcggaatgtttgggtatcctccacatgagaagaggaccccttcttttccttctttccatcgggggaaccaactgatngttctaccttctatcccggccaagagctggtcccaatctattctcctcttttcagtacacgagcgatggctcaggagccgacatggatgtcttgggtcttgttggaacaagtgcgaaaccaaccatacacagagggcgggtaag

SEQ ID NO: 299825 - DNA, 191 bp, Glycine max
  unsure (1)..(191): unsure at all n locations
ggattcattggcctcttacctgttcattttatgtgtggaaggcctatncgctatgatcaagaaggtggagagtaaaggacaggtgcctggttttgggtttgtaggaatgcccttctatcagtcatcttgtgtttgcgggtgatatctattctttgagcatccaataaggagtgtatgagtattcaacatat

SEQ ID NO: 299826 - DNA, 74 bp, Glycine max
cagcttggacacaccaacgagtcgcatcacactctcttcttctgtctgcattttgattccattttcttcttaaa

SEQ ID NO: 299827 - DNA, 175 bp, Glycine max
  unsure (1)..(175): unsure at all n locations
ttcctttgactcgattagctaatgatgtgaactgcacgtaatatgactgaactgaaccaatttgagtgagtttaaacaactgagatctangacattcacacggtgatgggcccaattctgtctctaggcttgcgtanaacaatccatgttgtgatgattttcacgagtattattt

SEQ ID NO: 299828 - DNA, 442 bp, Glycine max
  unsure (1)..(442): unsure at all n locations
gcttgctgattacattctcccnctttctcaagaaaattcttaattcttcttgacatcatcaaaatcttcatgatttacaaatacaacccanaaataaaataaaataaaactggacgacaaataaaattgtttgctcttttcaagtccaagccggttcagcccaattctggatccaagcccaattgcttataattctcttgaaattaaattaaaacacaaaattagtcaagtaggtccaaatgataaaactgcataattaatttgacaattaaggttaatcagtaattaaaatggtgacagaaaggggtaagaaataggagaaaataatgacacatcaataggcaacttccccccctatggtgattagcttgagtctcaaggaagtttcanaccgagtggcatgcccccaagtacaaatatttttcctcatgaaaaactacta

SEQ ID NO: 299829 - DNA, 377 bp, Glycine max
  unsure (1)..(377): unsure at all n locations
agctngtacttaacttatganaaatcaagaacaaacttgttcgcacatcgttcgcgtgtatgatatccactcgacaaggtttgaagtggaggagaccttcaatcctataacgcaacgtggcggacaaaaatgggcagttaactngaatggccattattgtcaacgcggaaggtatnttgcgcttcactatccatgttcacacattattgcagcttgtggttacgtgagcatgaactactaccaatatatagatgttgtttacaccaatgagcacatcttanaagcatactccgcacagtggtggcctcttgggaatgaagcggcaattcctccttctgatgaggcatggacactaatccctgacccaactacaattc

SEQ ID NO: 299830 - DNA, 388 bp, Glycine max
  unsure (1)..(388): unsure at all n locations
ttacgaagctntctgggccttgcgggcttttataggagatttatcaaggggtatgcttcgatagcttccccattggtggcagcaaccacggtggagcctttccagtggaccgcggcggctcagctcgcatttgacctcttgaagaaagccttgttcgaaaccccggtacttgccttgccgaatttctagctaccatttacagtcgagaccaatgcttctggggtgggcatgggtgcaatcctctcttagcagggccacacaattgcatattttagcaagccatttttgcctaagcttcaacgatcgtccacttatgtccgagaattgttcgcagtgatggcggcggtcaagaaatggtggcaatacctcctcggtaaccggttcatca

SEQ ID NO: 299831 - DNA, 445 bp, Glycine max
  unsure (1)..(445): unsure at all n locations
tctaatttactacattcatgcaagacttaattggtttcctttnttaacaaattgaacattttgtaaagacaagggcttaattataattgaaaaaaagaagattgtgtttaattaattaattaccaaaggtgaaggagctgaacattatgcctaaagaatcagagagctctcggtaactcttgtacatcttcaagtccactttgcgaaggtaaggtgctccatccatgctaactttgacaaagcttgcattagggctgctgttcttctcgctctcttctccaacgctcttttgcacagccaacatgttcttccggaaggaccgcacaggtggccaacccaccacctgcgtcctacacatttcaactcatcaatatcactctatatattatgatcaattaatacgcatcatgaacatatatggcaatcatataacgaagttaaaata

SEQ ID NO: 299832 - DNA, 273 bp, Glycine max
  unsure (1)..(273): unsure at all n locations
ttaatttttttgctttaccttctcttccattgnntgttcttcatttttttctccatgtatctcctcacatgtcttgtgctaaatgttgttaacacgattctatagagtttccaccgattaaacttgctatagaagctagaattgattntctatggttcaaatttcttgttattgttcttgaaccatgaattgtgttgagtttaagttgctttgagttttgtcttggtattttttgtggctgaaacctaaaccataaaattcttacaaaatatt

SEQ ID NO: 299833 - DNA, 334 bp, Glycine max
  unsure (1)..(334): unsure at all n locations
tgatgtcattcaaaacacactatgtagacctaaatgaagactaatcattgtttatttaattggattcattatacgatataatttgttgtaacccgttactaaccaattaatattatcaactactcgtttggttaagcaaggaaattgttggtccaacaaaaatcatttacgcgtgcagcatacatcattgtcataattgacaacacataatgacatgcatgtgtattacagtttgagcgtgacaacacattggctgacttcagtacacattntgaaactagcagtcgctcgacaacacattggttgacttgactacacattagcgacaacacat

SEQ ID NO: 299834 - DNA, 520 bp, Glycine max
  unsure (1)..(520): unsure at all n locations
catgactatgcgatgcaatactagccanncactcgacccgngatccttnagtcacctgcngcatgcaagtttggcttcattatggagcagagaaactccacccagtaacnggggaccaccncgacaggaaagctctttaccatctcgcacccgagcctncagcttatctatctcctctgtggagctatccagggtcctggtcaactggctaatcctctcgactcgacaagatagagagtcgaacgcttctctgcttctttcgatggtgggtcggaactcgtaaccgcttgcaatgatatcaacagcccctttcaacaactctcccgcagcagctccagcgaacggctctgccatcactactcacacacactgcgaggaatgaaatgaaagctcacgaataatatgtactactcacacgacacaccaaaccgcgcgttttttcgttgacgatgactacgctatgatctctgagctcgcgtaatcanaacatagaaagacactgtattctcttcgattaccg

SEQ ID NO: 299835 - DNA, 347 bp, Glycine max
  unsure (1)..(347): unsure at all n locations
tatgcgcatatttccttacaaacgttctcttgcacaagacattctattaaccgaataaaatgcacccatatacaatcaaggcagcttcgttacctagattatttacacgtacttccaaggtgtatttgttacttacatcacacacatctccttggctaaattcacatacatgcatactcaaagcattntgggggaccaaaaattgcacatgtgcacatcttggtatttctaatacctatacatacacaaacctcatgatgaatcttgactatctacacaataaggtgctacatttcatgctcttttcaagtttttgctacctaaggccgcatgcaaattcaagtata

SEQ ID NO: 299836 - DNA, 134 bp, Glycine max
cgacccccagaaggcaaccaggcgccacggcccagaggcaaccgcccgccacggggaacgccggaacccaagccccgccgcaccgcgacgaccagggagaccgggcgggggacaagacagccacgccaaaaaaa

SEQ ID NO: 299837 - DNA, 302 bp, Glycine max
  unsure (1)..(302): unsure at all n locations
tgtctatcgcacttacaatgacaaacatcatctttagcacaaactatgagcaccaaccaagaaatgaatatagcaatgagaaaacctatagaatccacccctgtcctgtgtcctatgctgacttgctcccatatctacttgataattcaatggtagccacaacctctaccaaggttcatcaacctttatttttccgaaaatacgactcgaacgcaacgtgtgcttgtcacggagaagccccggtgtgtaccattgagcattgtanggctctgaaatgtaaggtgccaggccatattgatgct

SEQ ID NO: 299838 - DNA, 376 bp, Glycine max
  unsure (1)..(376): unsure at all n locations
tgcttctacatgtttttctatctattacattcgtagntagaaatatttttgttctatacacacatgacacctacacctttgcacacatgttgagatattaagccctatacccgggtctgtgtgagacatanggagtggaggttgatctatggtcatgttgggtcttcgacttgcttgataacagtgatgcctcatctagagttttcttctttttgctgatgcattgtcactggtagatcctaccgccacaatgttgttacctaagaggatgatatctctagaagccaatgagttacatgataccaccttgggagttgcactagaagggactttggatcctttcatangtcctgaatatgacacatacaactcactt

SEQ ID NO: 299839 - DNA, 428 bp, Glycine max
  unsure (1)..(428): unsure at all n locations
agtttataattattaatttgacggttctccacattntgtttcttgaaattggtattctttctatgggtgagaaacttgccccatttgtatggcctatattttcaagggttttgctcatttatcagcttctccaaaggcttgacctcagtttcatgcgaaaggtagaagaatggaatggagaacctttctttctcagagttgaccaccactctgtgttccacactctcatatgcatcattgctccaaacctgcacaaacaactccaatcctcanataaaaattctctccactaattacgggaataaatagttcataaactcaaagattagaatatgttntttttaaggtcatcatgacattggtgtgaagtatttatacttttgttagtgactaatctctcctgngaagctgggcagaccactattagt

SEQ ID NO: 299840 - DNA, 403 bp, Glycine max
  unsure (1)..(403): unsure at all n locations
tctacttatgtggcagggcaggcttccttcactttcttgtctccaacgcgagctttgaccactgttcttccttcccgcgatgcttcttttcatgtccgcctgagtgggcttatagcctaaaccatacttcccacgatttccttgggtatctatcaggctagttatgccgccgttgtttttgcctaaacccatcccgggttcataaccgttccccaacataactcgggccatcattaccgctgcatcggacagacaaggctgcccaaagagggagtccacggaggaaatgctgaccacctcanaagactggaaagcagtttctaacgattcttctgcggcttccacataaggcatggaggatgggcagcttaccaagatatcttcctcgcctgacacgatgact

SEQ ID NO: 299841 - DNA, 333 bp, Glycine max
  unsure (1)..(333): unsure at all n locations
ctaaaaaatcctatatttctagggtaccctacctatattatggagccctaaatacaaggcccaaaaataatgaaaccttaatctaatatttacaaaagatagtgggctcgtacttagcccatgggcccaaaatctaccctaaggctcataaaaaccctagggccttctcttgcatctctggcccaatctacttggagtttctatccaatgcccttgcggngtaagattgcatcattccctccccctagaagaggatttgacctcaaatcccgaggctcttgaactttgggctttttttctcacactatanaagaacaaaacatatgtatagtg

SEQ ID NO: 299842 - DNA, 156 bp, Glycine max
gcagctctatggtaaatgttaatgtggtgaagggaaattccggcgtgttaaggtttcagcattgacggcgacgcagagaagccgtcaacgtcgtccgagatcgtgttggaacccatcatagacttctcgggtaccatcacattgccagggtacaag

SEQ ID NO: 299843 - DNA, 322 bp, Glycine max
  unsure (1)..(322): unsure at all n locations
atatagggccctctgaataaacttttgcataaacacttatatgagaagaaagaanaaaaaaagcttctcattgttaaggtcatttgaaccaaaattctcaaccaacactcctatngaataaaatcaacgtatgcacttcaaattttatacaagatattcttcatgtaacttctccaaatgtagattnntaattatgagaaaaacttaattatttcatcttattttcttctataagtacttattgaaaagtttctccgaacatgacaatcattaacattaanaactgcatcctacctaaatccatntgctagcaagatcatta

SEQ ID NO: 299844 - DNA, 364 bp, Glycine max
  unsure (1)..(364): unsure at all n locations
taagcttacctggaagcctaggaattaatgcttttatatataccattctctcatagaatgcaaagcatggaaagagaaagactgagtagaaaagactgggaaagaggcagtagacccctcaaattgttcttccttttttgccttctcagtattcctctttaactctaggtgctacagatctctatttattgccatactaaaccaacaatatggaattaatctgttttatttctagtatcccatcaagcaccaagtgaaaaaataataccatcccaacatacagttgtacttaccacctacaccanagtaatagaacctacacattaaaaaatattaatagtttaaaggatagtattttttttct

SEQ ID NO: 299845 - DNA, 316 bp, Glycine max
ttgagccaaaatcctaactcaccataaaccttgacccatggtgatatatgtcaatccttaccctcaggagcaaaaaagaagagaaggaaaatttccaatcaaagaaaaaaaaaagagaaggacaatttgctatcaaagagaaagcaaataaaaaaaagagagaaggaaaatttccaatcaaaggataaaagaaaggaaatgaaattcccaatcaaagagtgggagatagcgaacagaaaagaaagaaaactcccaaccaaagagtgggagaaagtaaaaggaaggaaagaaagctcctgatcaaggatcgaaagaa

SEQ ID NO: 299846 - DNA, 414 bp, Glycine max
  unsure (1)..(414): unsure at all n locations
agcttatgaatttctatttgcaatgttatctcccaaatgtgagtagcatctctactatgataccagttatgaaaacaatgcacgaattctaaaatgcaacacttagcagaaagggtcaattgtaaagttcatatagcaattcaattctaatccatatataacgtattttatatatattcatattccccaagagtctacttttcaaatataattttattttcatcaaacgttatgtgaatcaaacaaagtaaaaaactatgtgaagtatgtcaaagttgaaaattgaaaacagcatgtgtgcacaaactntcaacaccaaataatttagaaatgactctaagagcccatactcatggaggataacctcccanaccanaatngacattaaagaanatagaaactctcaataccttg

SEQ ID NO: 299847 - DNA, 307 bp, Glycine max
  unsure (1)..(307): unsure at all n locations
tggaaaccaacatttaagatatgataagattgttagtttaaggtaatgattgaaattaaatttaaaaatatattcgattttatagttataaaaaatattgtaacctacatttaaatttagactattatcagattgctagtgtaagataatgattgaaatcaaatttaacaatatattacatttggtagttataaaaaatattgaaaccaaaatttaagatttanaatatatctattaattcatatgttctaattnttttacgagtatgtttttagagnaaaaaattcatttaatttatttacaaaat

SEQ ID NO: 299848 - DNA, 167 bp, Glycine max
actgctccatattactgataatcatgggacccataccccaccaaggtatcaacctcattctccgaaatacactcaacgcacgtgtgcttgcttgacaaccccgggcgttcattgacattgaaggcctaagcgtaagtcaggtcaattgtgcggctgctgaattcaga

SEQ ID NO: 299849 - DNA, 296 bp, Glycine max
  unsure (1)..(296): unsure at all n locations
cttatccggatgcagaatatattccgaaaagactatctggatgtaagaattacctttaaaagttttccaatataatttacattcaaatatggaagaagtaatgggagttgaatttcccatttgaatgcgatggctggaaggcttcctttactgggctgcaagtttgcaccgaaggaaccattgcttactgcacctctaaattactacctacacgccacatcattttaaaacaattaaaattttcnaaagtnaccccgacgtgtccttcgcaccccattccccgtcccatggatgct

SEQ ID NO: 299850 - DNA, 462 bp, Glycine max
  unsure (1)..(462): unsure at all n locations
agcccanncgttaggccttaattttgggaacaatcncgngnattggcaaagaagacatcatatgccaagggaacaatttcctcctatcactggaggtatatacctaggttaagagcgaggttgattcatatttctaaaaatttgagacaaaagttgacctaatacgcttctacaatcttgtcaagataagttgcatcgaggatgatgaagtcgtccctatatacttgtaaggtctcaataactatatatacccccgaaagaaaactacttctttgacaaagacggtgttgcactattagaaattacactttcaacatcggttatttagggcattctacatcggctctaanaccgatgttgaaagtgatgatgttgaatgtatcatcgttaacatcggtttttaaaaaccgatgttaacatanatatgataacatcggttttctaaataatcgatgtaaacac

SEQ ID NO: 299851 - DNA, 384 bp, Glycine max
  unsure (1)..(384): unsure at all n locations
ctaagcttaagctgctcaattgctccaggttgctgcatggaagggcaaaggtctgtatggtggtcagcagaagagtacaaaccacanactcttgcgacaggtacagatttcggattcaaagctagctgggataccaagttaaccaatgcatccaagttgccttcaagcttcttagtctcagatgatgcagntgagtttgtagctacctcatgcactcctctaatgactatagcatcatttcttgcgctaaactgctgngagttggaagccatcttctcaattaaatttctggcttcagtaggagtcatgtctncaagggctccaccacttgcagcatctatcatacttctctccatattactgagtccttcataaaaatattgg

SEQ ID NO: 299852 - DNA, 167 bp, Glycine max
  unsure (1)..(167): unsure at all n locations
agctangcacttaggatggaatgatattngnagctaatgaacaactttcttaactatttgtccttcagaatttactgtttctttntgctaatatgtaaatataaattgtataaggctatggtgtaaaaacatggtctaccagctcaatatctatggtttatgcttct

SEQ ID NO: 299853 - DNA, 403 bp, Glycine max
  unsure (1)..(403): unsure at all n locations
ccttgggcaatccttaccatacaagacaattttgtggtgttgagttagaccctaaacccgaaatctaagatggtattagagcctatcctagatacattgttggggcaccaacattgccacgctccaggcccatagccctaggcattagggggtgtgttggacagcttccttaattgcagtcactgctaacctgctntaattgcagcagcatatgagagttggttgccaatgtctcagaanaggctacctatgaagggactgaccagaacggctgagtgaagcgtcgtagtgtgcaatcaatgagtctgaaacatcaactcttagggggttgagatcccacattaactagagataaggccttagtattgcttataaagtttgggcaattctcaccatacaattc

SEQ ID NO: 299854 - DNA, 281 bp, Glycine max
  unsure (1)..(281): unsure at all n locations
tatcatctccctcttcatcatttggggcgctacttgagctgccagatccctccatctttgggtgtattctttgaaagattcatgctccatcttgcacatgttttgcagctggattctattcggagccatatcagaattgtactgatactgcctaatgaaggcaaccattangtcctttccgagaattgactcatgaaggttccagattagtataccagctgacggtttccccagaaagactgtcctggaagaagtacatnncacaattttcatttttcgag

SEQ ID NO: 299855 - DNA, 251 bp, Glycine max
ctgatggctatgagaagaaatcacatgtttgtcatcatcaaaaagggggagaatgtgaatgtatgtatacatgattttgatgatgtcaaaagaagaatcaaacaaggctcattttgcttcaagattaataccagattgtttcaacaaacaaagccttgattcaagaattcttcaagatcaagccttgcttcacaatgaaaggtttcaagtcattcaaggcacatgtaatcgattaccaatacatgtaatcg

SEQ ID NO: 299856 - DNA, 257 bp, Glycine max
  unsure (1)..(257): unsure at all n locations
tggatccatagtctccacgccacatctgtaaatgaaggantccaccctagccaatgagattgcgaccatcaaggctgatcaaaagcaagcacaataatgctatgctgagagccttgaagtaacaccctatccttccactagggagctggccaagcctcaccctacagcgagtgaaggtactcaagtcatgaacaaagggcttacaatccgagccttcattgtttaccaaacaagcctggacgatgaatttgatatag

SEQ ID NO: 299857 - DNA, 386 bp, Glycine max
  unsure (1)..(386): unsure at all n locations
accataagagccttagatattngttngatcaaaaagagcttaacatgaggcagaggagatggttagagttcctttaagattacgattttgagcttagctatcatccaggtaaagccaatgtagtagctgatgccttaagtagaanatcccttcaaatgtctgctttgatggttagagacttggatctcttanagcagtttagagacatgagtttggcatgtgagatcacctctaatagcattaagttgggtatgttgagagtcaccagcgaactcttgagcgagattcgcgagggtcagaagtctgacccattcttgtcaactcagttagagtccatagtcgcanggagagagagtatttttagagtggctactgatggagtcttg

SEQ ID NO: 299858 - DNA, 344 bp, Glycine max
  unsure (1)..(344): unsure at all n locations
tgtccatcaaacaactaggaacagtatggagtctaatcaatcaattcatatttcattnttgcttatccactttggacttttctttntgtggccttttagagggaaatgcagaaaggattttcctgtgcactagtgaagaaagaagcatattctcaactcaactacccaacaaaagggataagagactgtccgttgagacttgagaaggttctttctattgcattnttcctaccctgaattnttctatgattaccacgttacctttgcctctttgaagagcccaagcctggagagggaaaatgtcatttaacttaacccatgccttacatgatangtcacaaaat

SEQ ID NO: 299859 - DNA, 452 bp, Glycine max
  unsure (1)..(452): unsure at all n locations
ctttctatttaatatagngcngctactggccttaggtgaggtaatttattgaaaacacaggtctatcaaatntatgtttaattggatgatatatatatatatatatatatatatatatatatatacatatatatatatacatatatatatatatatatatacatatatctatatatatatatatacacacacacacacacaacctttcattttcacatatatacacccacagacactctctctcgcagacatatatctcttctgtctctgacacagtgtctctctcaaacaatacacacttctctcgcgagcatccttgagcaactcacccggcgcatggagcgcatgaacaaactaatatacgcactgcacacacattatcatcccaccgtgataccccgccactaccttgtgagggatcttctctcactcaacagacactgaatacaccg

SEQ ID NO: 299860 - DNA, 389 bp, Glycine max
  unsure (1)..(389): unsure at all n locations
tgctgatggtggtgttgaactttntacttttgtttatcatagtaataatatgggggatggggcacttgcatagattatcgatttgatatgagttattatctacaaaagagagttctctttagtcttggggttgtggtggggacattgctttgcaatatgcatattcgcagctgtggttgtgtaatagtaatagcattttttaaagcatctttaatagcatttttgtgtaatagtaatagtttagtttttaaaataaagtaataatccttagaaaacattntctattatcgtaataaacttttggtagtttatttaaaattaaatntatcattntttaccatgatattattacatcgatgtttataaagaccacattatgtatgaatgga

SEQ ID NO: 299861 - DNA, 406 bp, Glycine max
  unsure (1)..(406): unsure at all n locations
nttgttttcaatgacgagcgtctcgaaatcctacgggacactattggacatccgagtgaaaagttattgtcgtttgaatttgtttagagcttatgttttcaattacgagcgttttgatatcccacgggacacaatcggaaatccgagttaaaagttattgtcgttagaattttctcatagcttccgttttcaattacgagcgtctcgatatcctacgggacacaatcgaacatccgagtcaaaagttattgtcgtttgaatttgctcagagcttcagttttcaattacgagcgtctggatatattacaagactcaatcagacatccgagttaaaagttattgtcgttngactnttcatagagcttctgttntcaattagagcgtcttcatatattacgagactata

SEQ ID NO: 299862 - DNA, 243 bp, Glycine max
  unsure (1)..(243): unsure at all n locations
tgcattcggaattgcgaaagccatgctcnctcattangattcgttcctgccatctcaaataagcaaatcaaacataataagacaattatagtttctgtttgaatacctcacccactcaagtgtatcacacaattatggcttttctctaatgaaacactcttgccttttaccactctaattccccttgagttcttaagcaattcaagagattatgtgccacaacaaagaacaattcaccaaaat

SEQ ID NO: 299863 - DNA, 399 bp, Glycine max
  unsure (1)..(399): unsure at all n locations
ttatcattttactanattcaaattgncataacatttcactcagatgtctgattcggagacataatatatcgatatgctagaaattgaacaacggatgccctcgggaaatttgaatggtcataacgtttcacaccgatgtccgattcggggacataatatatcgagatgctcgaaattgaacagcggaagctgtccagaaattcgaatggtcctaacttttcacacagaagaccgattcggggacataatatatcgagacgctcgaaattgaacaacggaagctctcgacaaagtcgaatggtcataacttttcacacgatgtccgattcgcagacataactcatctaaacgctccaaattgaacaacggaagcaatcgacaaatttgaatggaataaca

SEQ ID NO: 299864 - DNA, 400 bp, Glycine max
tgagatctttagctcattctaaggcttatgagttattttcgagatattgagtattctcttgatgtatatggaggagaacacaagctagttatttatagagaaaataattataatcgtctttaatcaattaaatctacaaagtaattgattaattcaacgaagtaatcaattagattatctttttaatcgattaaagtattcttaccaacatctggacataactcaagaacaatgtaattgattaaatactccaagtaatcgattaaagtgttcttattcacttctgaacacctaagcgagagagacgtaatcgattaaatcacttggtaatcgattaaagtagagactcctgataaatcagccactgtctcaaacaatgggtaatcaattacgagatatc

SEQ ID NO: 299865 - DNA, 525 bp, Glycine max
  unsure (1)..(525): unsure at all n locations
cgattgtatgtanntcaatcgcancaccacggacccgggancctctaagncaccagcggcatgcagcnncgangtangcattagttgtaggagaacggagggaggngaagcnaannnngggagcgcacaancaggaacnggccangncannagnnnggaaaccatangcgggacgaaagactaaagcngaaaaaacacttanggcngacacgacgaagnccatggagaagctaagaaacattctgctaactctgaaggaacacaatgtcaatagttatacgaccattaaacagatatacaatgcacgaagtgcatttcgttcgttcataagaggaagcgatcttganatgcaacatctgatgaagcttcttgaacgtgatcagtatattcattggcacagaatanaggatggagacgtggttcgtgatatcttttggtgtcaccctgatgcagtgaatgtagtcaacgcatggtattcggtattttgatagacaacacctacnaaacagacctgtacagactccg

SEQ ID NO: 299866 - DNA, 306 bp, Glycine max
  unsure (1)..(306): unsure at all n locations
ntgaccattcgaatttcgagagtgcttccgttgttcaagttcgagcgtgtcgatattttatgtccacgaatcagacatccgagtgaaatgttatgaccattcgaatntgtcgagagcttccgttgttcaatttcgagcgtctcgatatattatgtccccgaatcgaacatctaagtgaaatgttatcaccattcgaatttctcgatagcttctgttgttcaatttcgagcgtctagatgagttatgtacccgattcgaacatccgagtgaaatggtatgaccattcgaatttctcgagagcttccg

SEQ ID NO: 299867 - DNA, 411 bp, Glycine max
  unsure (1)..(411): unsure at all n locations
agcnngnncattttctttatcccatnngaactntnnggnctttntcagtaagttcatgatcggcctagccttctcagctatccaaggtagaaatcttatcaaagaggctatgcgtcctgtgagtctttgtatctctttgaaagtcttcggactcctcatctcaatgacgacttgacatttatctagattagcttgtatgcctctttgggaaagcataaaaccaaaaaattntcctcctccaatcccaagaacacatttttagaggttaagtcgtatgtatgtttttggatttgtgaaatgatctcggctaggtcctcaacatgggacttgactccatnggatntgaccactatctcatcaacgtacacctctatatttctacgaatnntatctttgaagatcttatccatg

SEQ ID NO: 299868 - DNA, 337 bp, Glycine max
tcttcaagaaaagattattcttggtcttatatgattctatgaagataacctacaactaaaaatggtttctgacatggttctgtaaagatgaaatttttgaaaatggacaagcaatgactatcgaacacgaaagtaaatctctgctttactttttttatttgttatttgcttatttatttctcaatttagaaataactcaatggacaaaataatttataaaaataacatattagccaatgacctacattcaatttaaataaatggtcatgattctttactgtcagtgacttataacccaagttaacaaaagggtctattgacataatacttgtagttt

SEQ ID NO: 299869 - DNA, 456 bp, Glycine max
  unsure (1)..(456): unsure at all n locations
agctncgatattagctgttccattttancaanaaacacaagnggaagtttattcagaanattagagcttatctcttttatcttagtgagagtgattctcctaaattcttgagtgattcaagaacaccctggctgtatcaaaggactttcacaacctttgagtgttgccctcgctggaaagagtgattctttccttcctatcatctccacccttgttctttcaaaccacaattccagaaaatccacctctgcccataattatctcgtggccataactcccattntatgcactcaaattaagtgattcttgagcctaaattgactntcanaacgagacctttcacctcgntctgaaatcacctcattnggagccctgtagcttcagttattgccatgtctatatttctgtccagccaccacttaacctacatgttaccatcccattcatccattttat

SEQ ID NO: 299870 - DNA, 353 bp, Glycine max
gcttatgaatccatcatactcttttccacattatctataagttcctctttcaaacccattccgaaacacaccagtatagtagacgcggagttttatttgagcaactgcgtcttttacaagctcccgttgcttcctgtgttagaaaactaactttaagagtattcaccaaaaaaaaaaataaacaaactttaagagtcataagttgcttatggaaatatacatcctgttttagccgttaaaaatacatgcttcgacggatcaataaatttaatggtaaagcaccacaattctgtgattgatgtggtcttttttacgcagcaagaataaaagtaccttaaccattaaatcagatt

SEQ ID NO: 299871 - DNA, 399 bp, Glycine max
  unsure (1)..(399): unsure at all n locations
agctnctanttttnngtttcanaacttnngnnnntctgcaagnnggaaattctgcagaaaacaaaatgttggatcaagtggnctcagaataattaagaaaggggggttgaattaattattaatgtgtccttactaattaaaaatttaaccttcttaatgttactagattcaattangcttttactactaagttaagaaagtaaagaacagaaataaaaacttaaccaaaagtaaaagcgataattaaaagtacatagcagaaattaaagagtgtanggaagaagaagacaaacacaagaattatactggttcggccacaaaccgtgcctacatccaatccncaagcaacctgctgttcttgagaattcttttaaccttgtanaatcctttacaagccaa

SEQ ID NO: 299872 - DNA, 442 bp, Glycine max
  unsure (1)..(442): unsure at all n locations
tgacaaacaaagctaatcgaagcaagcaagaaataaaatcaattattggcacaaaatcaattgtgcaaaaggcatttgaaatggtaacatcttttaatattttatattcattntcttataagttatataataataactcatttttttattntgttattttttatatgatatatgaaagtttggtgaaatttatataaagacatcatacattagattatattatttaatttgtcttttactatatttaattntaatagaaagaagattcaaaatctggtgaatggccagatgctatggaaagttggaaggtcacgcacatgagatctaatggaacttggtgcattccaaaaggagaagaaatcatggtaaagaaaaaattcatttaaagtcttgatgtcaatattagaattaaagacattaatggtattatgatatcatatct

SEQ ID NO: 299873 - DNA, 438 bp, Glycine max
  unsure (1)..(438): unsure at all n locations
agcttgagcatantaagttactcccgcattntatctctagcatgcattgtatgttggtctcgtcctttgtcacgggaagccggaaggtccatatcaccttcttaattgtacacatggggcactgcgcccccaaatgcgcaagtaagaagagataattttccgagctctcgtgtccgtaaaatgcattcatatcatgcatcgcataagcatctcttcataacatcataatggacatatcctgcatttgtccgttatcatattccggcctcacattttgcatgagtcatggcatcatcatgcatatgcgttcaacaaactttntgatctgcaaaattgcataccatttgttttcatgtttgctcatccttgcgttntcctctacaaaacananacaaaaaagggggaagcgtgaaacttcacactacattcttagttcca

SEQ ID NO: 299874 - DNA, 384 bp, Glycine max
  unsure (1)..(384): unsure at all n locations
nttcgcanagcttacggtaaaatctgggacttagctatggtagaagtctccacagaggtcattgcctcccttgcccagtattatgatcagccgttgaggtgcttcacctttggggacttccagctatcacctatggtagaagaatttgaagagatcctaggatgccctctagggggaaggaaaccatacctcttctcagggttctatccctcattagctagaatttccaagatagtccaaatctcggcgcaggaattagaccacaggaagcaagtcgaaaattgggtggttggaatactgagaaaatatttggaggcaaaagcaagaatctcggcaggtaaaggcgagtgggccccattcatagatattctcgcattgttgatc

SEQ ID NO: 299875 - DNA, 221 bp, Glycine max
atctactggcttagcgagccatcccgttagcgcaacactgctgggcttagcgccaggaagactctggaagaagatgagctgtacaggttcgctaaacgcaccggttcatctcactaagcgcaccacttcagttaatccgctaagcgagaaaggcacgctaagcccaacatcactaacgtgtgctaagcggtccatacgtgcgctaagcgcatgagcacgaa

SEQ ID NO: 299876 - DNA, 105 bp, Glycine max
ttctcgtgatcctttgcgagcgtctcgatcgattagagtcccccgttcgctcatatgggtgacatgattttaccattccctgagtcggcaagctttcgtttgtca

SEQ ID NO: 299877 - DNA, 262 bp, Glycine max
  unsure (1)..(262): unsure at all n locations
ggtacctggagatatgtcgcgggggtcaagagaccttggggacgtcaggtggggtgctattgcccaaaaccaagcttgaccaatcccaacccaacccgggcatagtcagtcaatgagaacctatgatgtacctaaacaggcgagctcctggcagtcaactgataaaaggaacaaagaaccacanagcaggagacttgtgtggtggctggccagctgtgaactatgattgatatatgggatatgggctctggtaatcgattac

SEQ ID NO: 299878 - DNA, 248 bp, Glycine max
tacccagctggccttgaatcagatatccgtgcctatcgcaaaggtttgtgggttgtgctcctttggtgaccaccatacagacctttgcccttccatgcagcaacctggagcaattgagcagcctgaaacttatgctgcaaatatttacaataaacctcctcaacctcatcagcaaaatcaaccatagcagaacaattatgacctcttcagcaacagatataaccctggatggaggaatcaccctaacc

SEQ ID NO: 299879 - DNA, 328 bp, Glycine max
tgccacccagctcgcccaggcgagcaaggttgcttcctccagaagcaacagccttctggaggaatcttctggagggcccaagtgggcctggttgctatttgcacccctatttttactaaatacaccccctgccttttttttggtgattcttttttcgtaaagttacggaaacttatgaatttcgtaacgatacttgttttctttccgtaatgttacggaaccttgcggattacataatcatcccttttttgacttacggaatgttacggaacctcactaattgtgcaacgatgcttccttttgatttccggtgtgtcacggaacctta

SEQ ID NO: 299880 - DNA, 433 bp, Glycine max
  unsure (1)..(433): unsure at all n locations
agctttacaattttgttttaaatccaagcccataaataatataaaatctagataagataagataagatctagatgaaataatatctagatgagatcaaatctagataagataagataagataagatctagatgaaataatatctagatgagatcaaatctaaataatatctagatgagataaaatctagataagataagatctgatagaataaaattgtctgctcttttcaagtccaagcccaattccggattcaagcccaattgcttataattctcctgaaattaaatcanaaacacaaaattagtccagtaggtccaattgataaaactgcatattanattgacaattaagcctaatcagtaattaaaatgatgacaaaaagggttaagaaatatgagaaaatgatgacacatcanatcccctcacactta

SEQ ID NO: 299881 - DNA, 294 bp, Glycine max
tatagcttactgattatccacaaaaagcttcactgcatcactatccttgattcttaattcttgtaataatgtgtccaacgagacagctaggcaagcactcattgtagctggaacatacttagcttcacatgttgataaagccactatggattgcttcttagaactccatgatattggtgttgcaccatacatgaatatgtaacctatagaactctttctgtcatctctgtctcctccccaatccgcatcaatatatcccactaattcctctgagctgatgctgtctatatttgg

SEQ ID NO: 299882 - DNA, 448 bp, Glycine max
  unsure (1)..(448): unsure at all n locations
gtttaaattgcgtttaatcttanagtttgacgtgctgatcagttttttttttttccggagttaagaatacgggtgtcttccaaatacacatatttaaaaagaatattttattaaatacactaacgaaaattatattttaacaaattataatttgaatatattttaaaaccattcaaagcgctcgacagtaattgctcgagaaccttcatgggccatcaagaaacctcattgggaaatcgatgttacccttgatagcaagaaagtgaagaaactaatttcttttagaattttttatttattgaaaaccatacaaaccacattacccgcttcctttctaagtagcatacgtgaagcaccgtgtgccacataactctggngtctctactcactctcttgtgcctttgagttaaatcaattctcacttttagttcctttcnncaataattat

SEQ ID NO: 299883 - DNA, 421 bp, Glycine max
  unsure (1)..(421): unsure at all n locations
tatataatgatgattataggtggttgtttgatgccagatacatctggtgcaagagttcattttatgtatcttcttttattatcaaatttaactgaggcaagtcattatagttagggtgtagcagtattagcatcccttttttgagctctagatcgggctataaagccagaccaaacagaaatcggtggatgtttgttgttgctacagtcatgagcgtgggaccgaattgaatgtattaccccaaagatagatcacctatccatggaagaagcacaagaaggactcanatttcctcttgcacgaaggtggtctcgtccaaggaccggaccaaatattcccaccaattcagtgagattgatacgcatcatatttgataaactacatattaatgagggtcattnnttaatttcatgaataacta

SEQ ID NO: 299884 - DNA, 273 bp, Glycine max
  unsure (1)..(273): unsure at all n locations
attttctcaaggaaacctggattaccttttctttctcgggctcttcagcattgctcaaagaaccttctgatactttccccttttgtgattgtaacataaccatcntctacaattaacctgcaatgtacacactgttgacccttcaacgaatgagctntaacagaaagttcagtacagcgtccatctaatctccaagctcggagggtaacaaaacatgcactcanaccaccaagatccangccactggctcgaacacatncattcaatccaaca

SEQ ID NO: 299885 - DNA, 330 bp, Glycine max
  unsure (1)..(330): unsure at all n locations
ttagctttgancttatcagncaagtgtatggaccatgtcgtagccaaagtgctcatcggtaatggttccaagttaaacgtgatgcctaagagcactttggagaaattaccattcaatgcttcccacttaaagccgagttcaatggtggttcgtgcctttgacggcacccgccgagaggtaggggagagatcgatctcccagtacagataggccctcacacctgtcaagtcaccttccanataatggatattaacccccccctacagctgtctgttggggcgcccgtggatccactcagtgggagttgttccctcaacactccaccaaaag

SEQ ID NO: 299886 - DNA, 375 bp, Glycine max
  unsure (1)..(375): unsure at all n locations
tgccaagacaatgcacacgttctctnttttcatgtcctttgacttttgaatatatatcatttgtctaattagtagaatcttgggtgctntgtaaattttgcgaactctctgcttcaaccattttcttttttagttcatcctacataaatacatcttataaattattatcatacatcaatatcctgaatacttcaatatcactaaacaaaactcatctccatattagttactccccctcaccccataaccttctattagagaattgagcacaacaaagaaaaagtattgaaataaaaattacaattcttacaattacaatagcagccttttcagtaacaatgctttcatcttttcgagttcgagtgtcaatataaa

SEQ ID NO: 299887 - DNA, 461 bp, Glycine max
  unsure (1)..(461): unsure at all n locations
caagcttgatcttttattctatatctgacagccaatgggtgagtcccgtccaggtagtcccgaagaanaccggcctcatcatgataaaaaatgagaaggaggagctgattcctattcgggtgcagaacaggtagagagtctgcattgactataggaggttgaaccaggtcaccaaaaaggaccattttcccctgccattcattgaccagatgcttgaatgcctggcaggtaaatctcactactgtttccttgatggttnttctggctatatgcaaatcactattactcctgaggatcacgacaacaccacattcaccagccccttcggaactttggcctatagaaggatgcctttcggcctgtgcaatgcccctggtaccttcaagcggagcatgattagtattttcagtgattttgtagacnattcatagaggtgttatggatgatntcactgatatgtg

SEQ ID NO: 299888 - DNA, 417 bp, Glycine max
  unsure (1)..(417): unsure at all n locations
tgtcgaccttgctctagcctctggagaaatttttgaaggagaatgtttcaagtacataaaggaatgttntgaaaatggcacattgcatctcattgggctactgagtgatggtggagttcactccagacttgatcagttgcaggtgattatttggggttggagctgtttttccttcatgtgtattcagtttattctttctaactaactacttttgtacagttgttgcttaaaggagttagtgagcgaggtgttaaaagagtccgtgtccatattcttacagatggccgtgatgttctggatggctcaagtgtggggtttgtggaaaccctttgaaaatgatcttgcaaactcgcgcgcanaaggtgtcgatgctaggatagcatcacgtggaggtcgtatgaatgtcacaatggatcg

SEQ ID NO: 299889 - DNA, 429 bp, Glycine max
  unsure (1)..(429): unsure at all n locations
agcttgacatttatctggttcgcatngngnagcagattgatagcgtgatctgtggatcgagatggcggaaggtttgtaagtggttgaaacaggcatgagtatttcgtaagtaactcagaaatctcgggtaagatgggtggtgttgtagctgattgtgtgtttgtttccactctaatatggaagaaggtgctagaggggctcctatgtagaagacgacgcagttgcgagggagacacgggttcacctatttgctcacgttccccctgtaactccacaagcttaccctcagtgatgaatttcatggatggagacgtgtagtctgtcagaaccggtcctaatgttntgagccattcgactcccagaactacatctgtgccacataagggtaggatgtgaaagtccaccatgaacgtatgctcctgcacctgt

SEQ ID NO: 299890 - DNA, 243 bp, Glycine max
  unsure (1)..(243): unsure at all n locations
aaacccgaaaagacctgatctacgaattctttgtgaaaggttcgaagagtgtatttacgcacagggaaagtattagcaccccacgcgtccgtcacaagagacgacaacctttaatcaaatgtgcaaatatgacatcnaattatattcntttccctttttacggtcttaatgtctttttatgcctttnntatgttttatctttttgtggtcgacaagggtgtttccctttgcttctacgtattc

SEQ ID NO: 299891 - DNA, 464 bp, Glycine max
  unsure (1)..(464): unsure at all n locations
agcttggagattatgcttctatgtatganaagaaagagggagagaaagagagaggngggagcacgacatcgaaggaagaanaagggagagaagntgaactttgagttgtgtctcacaagactctcattcatcaaagttacacatgcttctatttatagactaggtagcttcctttagaagctgtcttgagaaaacttccttgagaagcttctttgagaaaacttccttgagaagctagagcttagctacacatacccctctcataactaagctcacgtacttgagaagcttccttaagaagattcctaaagaagctaaagcttagctacacacacctctctaatagctaagttcacctccttgagatgagaagctagagcttagctacacacccnctataatagctaagctcacccncatgacannaaaacatgaanatacaaaanaaaaaagtccttactaca

SEQ ID NO: 299892 - DNA, 398 bp, Glycine max
  unsure (1)..(398): unsure at all n locations
tgagactntaagcagtgcctgtgattagaatttcattntaatactttggagtacgaaaattcaaaaactttataaaaaaaaaaaaaaaaaaaaaagtagcatgcagtgctacaacaaaagcacaggcacatatgggaaaataaatgaagtgacgtacaattaagtccttgaaagaaagaaagaaagaaaaaaaaactagtggaagctcaataatggaggaagagaaagtgtggagcagagaaagaaacagaggtgtgtgtggcttcttgtggagaaggaagaagaggaaggaggagcaggtcaatgtcaatgtgattntataaagctagaaaatgaatataatacaataattccttacgtaagagtttttaaatgtatattggcattaatatacttga

SEQ ID NO: 299893 - DNA, 453 bp, Glycine max
  unsure (1)..(453): unsure at all n locations
agcttgaggattatggtgtacctatcacatgtggtactaggtggcggtcgggcgatggtgcacaacaagttttccacatccacaatgcgcgcataaacccaccatcccctgttgcccacctccaactgagctcacgtactcccacgtagcccatatcctcgtttctctcaacaccgggtccccatcaatcctcccaagcttccccaacatcaaagtaatacaacattcaaacagcacanactatcacagccaagaaaacagagcanaggcagannactctgccaaaacaccaaccanaatcacagcttttctcacttaaagaccccagtaacaattccttcgttccaattcgttaaccgttggatcgaactccaaattttactggaagtctctagtacataagcctacattntgaaccgtgggatctactagcanacatccagaactcattct

SEQ ID NO: 299894 - DNA, 186 bp, Glycine max
  unsure (1)..(186): unsure at all n locations
gcatctgtgcggtatttcacaccgcatatggtgcactctcagtacaatctgctctgatgccgcatagttaagccagccccgacacccgccaacacccgctgacgcgaaccccttgcggnncgatngaatataacttcnnnatatgcatgctatacgaacgcattaccgatgagccctgacttcccg

SEQ ID NO: 299895 - DNA, 443 bp, Glycine max
  unsure (1)..(443): unsure at all n locations
agctaggcttttgctattgctgaagagaccagnattcagactttgctttgtgaattacaggtcacacacactacacccgtgttttttgtgacaacatgagcacagttgccttagctcacaacccagttctgcattccagaaccaagcacatggacctggacttgtcttttgtcggagaaaaagttctggagaagagaattcaagtggttcatgttcctactattgaatattgatcaatatgcagacattcactaaatctcttaccccatctaattntactctgtttagggacaagctcagagtggtaacaaagattttgtcaacccctcaagagcttgccaggggtattagagtagaagagtagaattactcctttcttttatttcagtctagcatagttagcctttatagnntaactcaactagtgacagttgtaataacag

SEQ ID NO: 299896 - DNA, 441 bp, Glycine max
  unsure (1)..(441): unsure at all n locations
tgtttacacctaaatacaatcatggtattnatactataaattaagattatattctaacattggaaaatttttacataattatctaatcataattggaaaatttttacataattatctaatcataattggaaaaattctacataattatctagtcataattcattatatatagcataaattttttgacttttaaaataatttaaacagttatttaattatataattaaatgataatataaaaatatttcacattgtatcagcattaacctcctgcttccggcttttgtgtacaacatggagtctttaattttccatcgattatgcggctgatactttgccacacataaatgtataagaaatatctttcagatgttgactagtagttgattcattattttacgggtccagattattctgaacatccattccactggtgcaatg

SEQ ID NO: 299897 - DNA, 276 bp, Glycine max
acaacgagatgatgcgctccatgagagggtggatcaaatggagaatagagatcataatgaagaagaaaggaggagaagagggaatgatggtgttcctagacaaaaccgaattgatggtattaaactcaacattcctccatttaaaggaaagaatgatccggaggcctacttggagagggagatgaaaatagagcatgttttctcatgcaacaactatgaggaggaccaaaaggtgaagcttgccgccacggagttttccgactatgctcttgtgtg

SEQ ID NO: 299898 - DNA, 234 bp, Glycine max
tatattatcaggtatcgggaacccttaattacactacatatataactgttatgcatggaaccagggcccccaatccacacacaaaagaattaatggaatattctatcaaccatattaccttattacacttcctacatatgttctaaaaagcacgatgatatcttccctcctgatcataccagcttgatgggtctcatgctctttttagtttcttcaacccctttactccatgac

SEQ ID NO: 299899 - DNA, 290 bp, Glycine max
  unsure (1)..(290): unsure at all n locations
attgagttttctatgccatcccttaatgaaatatttatgatgtcggtaaagaaatgttcgatcggcgtcatgcggtgatgcttcttttttagacctcgatcggtcatctttcttggcggacgtcgactggcacttttttcaatcaatatcggtagaaaatatttttttgccgagatgggctaattgtttcgtggtcgaataaatggaaacatgccagttttggccgacacaaaaacgtggttgggctcgcacanaaaaacctagccgacctacattgtacattttttatg

SEQ ID NO: 299900 - DNA, 536 bp, Glycine max
  unsure (1)..(536): unsure at all n locations
nggcaccgtggatgatgcantttgcaatacnggcgaangcagctcggacccgggatactctacagtcgactgcaggctgcaggttgatggtantggtgagagacaanggcatggacatggcgaaactaagtgagctccgccaattgcacactcactgcagacttcacgaacctanagtgccactccagaacaagactcacgtatacttgtggtgcttacctatctaccctagtgcacagncaaccacattgtggatcctttgcaacggtatcacttaaacaacattggaatggtgtatgaagacacttgatgataatcaactgatttaactggaacctagtgtaaaactatgcacaccattaactaatataagttatctatgcgatggctgataagataatcagctataacggctcaaatctatatactgtatatatatatactatatacatatgaccggctaatnttgggtgataatgtgtangacaacatggacatggtaattcacgtgcggatctctcacactcagttatacn

SEQ ID NO: 299901 - DNA, 529 bp, Glycine max
  unsure (1)..(529): unsure at all n locations
cacacacaccacttttntaaattatctgtgactaatatctacataatcctacaantaannnnaaaagccgatgagcatgtgaaccatggatnacacaactaagatacctaacccgacaataagagacagtcaagacgtgtatttttcaccaactatatgcacacgcataggattacaagagcacaacattaaaaactacatcatgggacacaaaaatgcgacatcacacactgaagtacctttacattccagccaaaactaactacctgcatgaaaagaagagtacgacacgcacaaggagcacccccatcattgcaggaaaacgacggcgaaacacacactgagctatgatacacctggggagatgagagcacgagagaaacaacagataactcactaagttatgatgtgagggaacaatactcagcatattacaagatgtcaaaacagagagagcaaggatatgactccctctacccgaaaatatggcgggcaaaaggccataggcctactcacaaccgacaccccc

SEQ ID NO: 299902 - DNA, 439 bp, Glycine max
  unsure (1)..(439): unsure at all n locations
agcttgngtgtcntgtttataacttcacaagagatatttgaaaaaggtattacaaccatttctctatctctttctcttatttntatatccttatgttttcatatgataagaagaanaataaattgaattaagaaaaaaaattgatcataatgatttatccctttaggtataatacaataccaaaattgaaatatttatagcatattaggtctacaatttttattcttacaatcttaaaaaataatcattctcattatgtatgtcttcctagatccaatatgcaataaatatatcaattttagccttccaccatatctaaaggaataaaccatntaataataatgactatgcaattatatgtgaatgataaaattagtttgtgggtacataatcacttatanaaatcatacanttttatattttaatttaacctataaat

SEQ ID NO: 299903 - DNA, 376 bp, Glycine max
  unsure (1)..(376): unsure at all n locations
tccattntcctttctactttgaatgagtaattcttaagtttcatacatcatcaggtccatccttatatttttttttccttctaattattaaataaaaatattgttttcttgaagtctcttccttccatgtaataatgaaaccgtaagatgaccaaattaattntacttgctagttatttgaagaaccaacgtcgcacgccaaaagtcaaaacctacaacccatctgtcatcccgattcattactctcgggattacttcagggtcatttcattgttatctcttcttccttttcacaccctcatttaagatttaaaacacctaanatacccttctttctctttaagaattaaaatcttctctcctactcatgtccatg

SEQ ID NO: 299904 - DNA, 435 bp, Glycine max
  unsure (1)..(435): unsure at all n locations
gctttcatctagtgtttatcagagcacaagagcttcaagtaggtgctccttanacctccattaattnttttctttaccttctcttccattgttgtttcttcatttttctccatgtatctcctcacatgtcttgtgctaaattttgttaacatgattctttagagtttccaccgattaaacttgctatagaagctagatttgattntctattgttcaaatttcttgttcttgttcttgaaccatgaattgtgttgactntangttcctttgagttttgtcttgttattttttgtggctgatacctaaaccatanaattcttacaaaaatattaaattagaagaaaacctanaaaatctagagtgacttgttcacctattgtagttntgtcatagaagtcatgtctagtcatgaaacttgtcacataagatttctta

SEQ ID NO: 299905 - DNA, 314 bp, Glycine max
  unsure (1)..(314): unsure at all n locations
tgttgccattgaactcatgtgctacaaccaagccatgtttgggtttgcaccctatggtccttattggcgccaactaaaaaagattgtaaacttagaaatcctctccaatcgccgagtagagcaactacagcacgttcatgtctcagaagttcaaagttcaatcaaagagctcttcaatgtttggtcaagcaaaaagaatgagtctggctatgcgttggtggagttgaatcaatggttntctcatttgacattcaacacggttcttcgagtggtcgttggaaagcgacttttcngtgctacaactatgaatgatg

SEQ ID NO: 299906 - DNA, 443 bp, Glycine max
  unsure (1)..(443): unsure at all n locations
agcttgagctaaatttgactaccatnaccttgaccaggtgagaatgccaatcttccctcggaagcaaaaaaaaaaaaagaagagaggaaaatttccaatcaaaggaaaaaggagaaagaaaatttccaatcaaagaggaagcaaaaaaaggagagaaggannaatttcaatcaaaggaaaaaagagaggaaaggaaattcccaatcaaagagtgggagaaagcaaaaagaaaagaaagaaaaattcccaatcaaagaatgggagaaagaaaaaaagaagaaagctcctggtcaaagaaaccagaagatatgtgccgagaggtccttggaccagacgatatccgaacaatacagaattgtcaccaaatgaacaaaagaaagaaagggaaaccatgacctanaagtggtcttctccctttattaccaaccaaaatcctgtgtgct

SEQ ID NO: 299907 - DNA, 300 bp, Glycine max
  unsure (1)..(300): unsure at all n locations
gtgaagtgaagaatatttattactgagaaacttaagtgttcattatagtggaatcttctttcctaataatttttttttctataacgctgtatcttagttaaatgatcaaagtttaattctacttcaactaatctaaatgtggtaataacgtccttttggctgcatgccttgttatatagggggaaactatctaanatgaaacttaatcttattanggaggtattttcagcanaatccaaactcatttctactttatcttattgcttatgttncagggcacaccactggattctatactca

SEQ ID NO: 299908 - DNA, 457 bp, Glycine max
  unsure (1)..(457): unsure at all n locations
agcttncccttatgaatctcaagtgcnctggcacgcctattattctcctcttaaacacgtgtacgttgagcatttctccattgtccaagcatatactatatgaactatgaaatcagttctatatgtggagataataaaatgacatgacttttaatgtattttacagtgaatgaataaatcattcatattaattatgtagaagctagaaaggataaaatgatacactntcttcttcttcctttctcttttaatttaaacaactaanagaattatcattntttttattttcattntctttnttatccaaacatgacatagaatggtttagttagaanaatattagcaaaacacanacagcggngctgaagtgaattagttaagggctctttntagtccaaggaccggcgctgatgcatggaatatgaaaatatatatataaaacgaattatgataaaac

SEQ ID NO: 299909 - DNA, 392 bp, Glycine max
  unsure (1)..(392): unsure at all n locations
agcttgtccattaaaatatgtntttgaagttagtcatttcaatttctgactaagtaaaatggatcatttttaaggtccaacgccttgaaatgatcacctcttaagtaaaaaaaaaaatcacttgataagctagaactacgtaggtctgatttcttcatcgcaattgaggatacgtaggagcaaaagccccgcttttgtcgaccaccccgagagatcgttaatggtccaacgccttaacgtttctctcctttcaaaatcaaaagatcatttaatggtccaacaccttanatgacctttntgttcaatcaaaatatatcttgcaaaaagataaaaaacaacttaaccaaacactntgttccgaaagaactacgtangtcttgattcctcatcgc

SEQ ID NO: 299910 - DNA, 385 bp, Glycine max
  unsure (1)..(385): unsure at all n locations
ttctaaatgataggctcagaatgcagaagaagtagcaatcaatttaataatgttctttatacatgcaagacaaaattgattgcaataataaatgagataagggaagagagaaatataaactcgatttatactggttcggccactccccgtgcctacgtctagttctcaagcaacccacttgagattntcctttctctttgtaaaacccttttacaaagtttgaaccacacagggacaacccatcccttgtgttcagaaattcttacaacttaagagaccctcagtctcttaatcaatctctttgattaagaagaagaagaagaagaattctctcttttaagagaaagataatacaatgaagttccataaactcttaatagatttg

SEQ ID NO: 299911 - DNA, 338 bp, Glycine max
tctgttctcaattacgaacgtctcgatatattacgggacacaatcggacacccgagttaaaagttattgtcgtttgaatttgctcagagcttctattgtcaattacgagcgtctcgatatattacgggactcaatcggacatccgagtaaaaagttattgtcgtctgaatttgctcaaagcttctgttttcaattacgagcgtcctgatatattacgtgactcaatcggacatccgagtcaaaagttattgtcggttgaatttgctcagagcttctgttttcaattacgagcgtctccatgtattacgagactcaatcggacatccgagtaaaaatta

SEQ ID NO: 299912 - DNA, 394 bp, Glycine max
  unsure (1)..(394): unsure at all n locations
aaatgtttcaaacttttatggtcagtgtaaaccacaaagggcctgcccaacagatagtgcctccagcgtggaatagctaacactaaagccatgagctccttttcatacgcagattttgataaatcgccctctgatcaagctatgctaactaaagctataggctgcctctgctgcatcaaaacagcaccaattcctctccccgccgcatcacattccacttcaaacagaatagagaaatcaggtaacactagtactggagctatagtcatgatctgcttcagatgattganagcctccagagcatcttttccccaaataaagttattcttcttagtcatttcagtcaacgggttagcaattgtaccataatcctttgataatttctgtataaccc

SEQ ID NO: 299913 - DNA, 420 bp, Glycine max
  unsure (1)..(420): unsure at all n locations
tccacttgtatactgcaaccataataaaagctntctattnttccctcccgtggatgtagcctttctcaaggtgaaccacgtaatcctgtgtgtgttctttctcatctctttctctttcaattctgatgcaatttgtgtgtatgataattttgttatgctgcatctattgctgctgttcttgcttgttcttcatcacttccataatagccttggctatcgatgtaggcaccttgggcaccggtgagggccgtatgaactgctaacgttccctttntactcattatttatttctttntattggtaatttattcaaatgttctcatcgtcatctttctcctttcgctatgttntttttcttttggccaactatggcgaaactgcatcgtgtcgccgtgttgtcgccaccatcttcgcgatcgt

SEQ ID NO: 299914 - DNA, 452 bp, Glycine max
  unsure (1)..(452): unsure at all n locations
gcttangtgttttatgaccaatctaaattctattaaatacatatattcgtagcatgtgttttcaaggaagtctacgttacattaactttgattatatactaacttgattggttatgtcatgtttgtttaataagatttgatgcccaagttttctgaagttgttgaaaatgattcacaatgtggtgaaaaaagaagcaactaatttatcaaaggattntgaagagttaacccctactaaacacaatttcagttgctattcagctatgggagaattgactcctaatgaaagttagtctgcaacccanaataaggataaatgatcttttgctcaataattctggagatttgattcccgttggaactgtatttggaactcanatacattcacagcccgaanacattgaaggtgcatataagcaactgggtggatgtttgataatgtcanaactaat

SEQ ID NO: 299915 - DNA, 249 bp, Glycine max
cagtgaaatatatgatgagatttatcaccatgcagcaagttggtgatacctactcaaacaccacctttagactactacatgaatgaaccttgcataccaggcactcactgttttgacaatataggataaattaataattatttattccattataacgtatgcacatcatataagttatgctaaagatattatggagagatatgatataaaactaacatattttgtggtacagataaacatagagaaact

SEQ ID NO: 299916 - DNA, 323 bp, Glycine max
  unsure (1)..(323): unsure at all n locations
ccaaacgcacccttcttcaaacattcggtcgtaggacttgctataacgctaacattctggataaagcggcgattacatgatgcaagaccaaggaaagatctcacgctacgaactggtagaaggctcggccaagtcttgatagcatgcacttttgtttgatcaacggatactccatctttagacaccacatatccaagnacaccacactttcaaccaagaaagcacactnttccctcttgccatagagtnttcgggctcttagggtctcaaatatttggttcanatgagtgaaatgcccctctatagatntgctatacaccaat

SEQ ID NO: 299917 - DNA, 432 bp, Glycine max
  unsure (1)..(432): unsure at all n locations
agctttacattactcacccacctatggntagcaaagtgtattgtgtgggaatttagatgatcattttgtgttttccttaagttggacaatgaggcgagtcgaggtggctttggccccttggccccgtaaaaggttgagtgagtttaggttatatttatccttgccctgctaaggtgcttcattgtcatgctggggtagttnttcatcttactcaagtacttcttccttatgctaaggtaccttttcctctcagtgttgagctacctccttgtctatgtcagttccctcatcctcaaactcaacataaccttattgagttgatttcattntcaccctaanaaagttgacttggattgngcatcatttaatgctcattgtangtggtcctgcttgangtcgtggagatggtagtgtanaatctctatgatgaca

SEQ ID NO: 299918 - DNA, 343 bp, Glycine max
tgtcctcggtgacgaagacaattgaataagccccttcgagcttttcacaggcgtcaacgattctcaaaatgaagggtctgtgtttggaagtggcgatgaggtggagaacaacctcggtgtcggaggtagtgttgaagatggacccgctgtcctcgaggttggttcggagggtgcggtagttgacgaggttgccgttgtgggccacgccgacggagccgaagcggtagccggcaacgaagggttgcacgtttttgagcatggattggccggcggtggagtagcggacgtggccgatggcgaggctgccggggagctggtccagcttcgactggttgaacacgtc

SEQ ID NO: 299919 - DNA, 443 bp, Glycine max
  unsure (1)..(443): unsure at all n locations
agtttttaattttatatntaaatntctaaaagctgatacaaatagtntaaacttctgctaatcgattacataccttgtgtaatcgattacaggcttttaaattcaaattcaaaattttcaaattttttcagaaatcaacttagccactggtaatcgattacatcatctgctaatcaattaccagagaggaaatatcatatttttgaaaagataattgttctttaaaaaacttttgtaaaatatttcctttagccaaacctgtgcaacatcaattaaggaattctttctaagattctaactatgtatatcgttcttcttgcatttctgaattcttgacttaaatcgcgcttatctttggcatcatcaaaacttcatatcatatatgcttctacatcctanagtaatactttgaaagacagagaagacatcanaatgatttttca

SEQ ID NO: 299920 - DNA, 245 bp, Glycine max
  unsure (1)..(245): unsure at all n locations
tcattaagaagcttactccagaagcttcctcgtggcttctttgagaagctttctcaagagacttctttgagaagctagatccttatctatccacacccctctattaactaaattaacctccttaaaaataattacggataaaaataacacaacaaataattcaacatcaaacataattactaataatttatatatatatatatatatatatatatatatatatatatcanggtgttacacctact

SEQ ID NO: 299921 - DNA, 429 bp, Glycine max
  unsure (1)..(429): unsure at all n locations
tctgctntggattatgatnnctatacaaaagttagttgtataaagtgactaacggngacccactctgcatgtctgtcaattgaccatgcgatatccacgtcgtgtaattcttcttaatcccatcacacaatagatggtcccatatgtcgtccagtatttgtcgccttccgttcaaacaattgatacgaggacactaatattttccatcttcatccagtcgacttctttntgaagtaaattgcaagaactgctcgacgccttcctcatattctgggttgatgtgactntcattcatcaaacttcgatccatctcagtaataactctgtgatactcanagttattcgatgcttganaatctcactnntttattataggtgtggccctatcccattcangaagaccgtctnttatggtagcttcatacgtca

SEQ ID NO: 299922 - DNA, 370 bp, Glycine max
  unsure (1)..(370): unsure at all n locations
taagtctagattaatttaattgtcactatccatggcaacctctttgataattttttttttcctttttaagaggaaacagatcgagacactgacgaatacaaatcacaaaaccgtgaagaaaattcacaaaaacgctaaaatttcataagttctcaacccacattccccaaaccccacaagttttcttcattttctcagcaaacaagcaggaaaaaaaaaaggcaaatcaggaggattgcacattatgcacaaagttagatctgagaaaaaaaaaaacccaaatgcatgcaaaaaagaataaagaaataaacaagttgaatcaacaatgatgaaatntgaaaataaaactaaaaaaaaaaaagtagaaaga

SEQ ID NO: 299923 - DNA, 450 bp, Glycine max
  unsure (1)..(450): unsure at all n locations
tatgcttttatttatatggacttaccttgaattaattcctttgatagcccttttgagccttgtttccctttccttggtttgaagctcactacaagccttaagtgaaaaaccatgatattaccatatccttaaggaattttggagctttggaattgttttgggaataagtgtggggggtttttgtttcattggacaacttgttttggtgactatgcttcatgatgtattttgggccatacttgatgtacattgtatattggttaaatgttggacatgctgaatgaaatgttgtttctcaaaggcaaaaaaaaaaaaaaaaaaaaagcaataaagttgagtgaataagatctttaatggcacaagaatgatgaaactcttgagtctactcttcatggttaattnttatctttacttcttttttntttttcttaatatgcacttattcccctt

SEQ ID NO: 299924 - DNA, 334 bp, Glycine max
  unsure (1)..(334): unsure at all n locations
ttagctttatctttataatctttgcatgatgatgatctggcctctgtgcangctctgtaacatagcaaataaagtctcaaagctgaatgaggaaggtcctgtagaaactagagtaggaactggcaaaggagtgaatgctgaagctagaactggtaaagatgaagctggaatagatggagctgcagtagaaggagctactgatggnggaatctcaaaagatgggagagtctttgaccttttccccttggccttgcgaggccctctaaaagtgattgaggggtcatcgacgttccacccaattttcttcatgtaagccaaattaatggttggactg

SEQ ID NO: 299925 - DNA, 335 bp, Glycine max
  unsure (1)..(335): unsure at all n locations
tgagttnttttaaaaatcatatttagctaaataggagagaccatgaactttaaaaaaaacctattaagtctgatgaaccgacctgtttagcaataatattntatattaaagatattattattaatatgatatatagtataattattatatttaaattataaaattattttaagagtttgacaattataattagtgcttgaaatatcttaattcgtataaatataaatgtgtacaaaaatatacattcttttctttgggtgagacttaaaagactttagcaatatgtcacccacaatggttttccatattttattgttaaaattgtcttattattt

SEQ ID NO: 299926 - DNA, 452 bp, Glycine max
  unsure (1)..(452): unsure at all n locations
ggtgttgaacccatcattagtgaccttataatcccagcctgaggtaacttatgcttantaacggtacccaactgcgttgtatagaaatctatacctggcgcaaaaggctatgggttatgcttctctggccaacaccacacaaaactttttcctttcatgccgcaacctggagccattgagcaacttggaacttatgctgcaaacatttacaacaaaccttctcaaccttagcaggcaaatcaaccaccgcagaacaattatgacctcttcaagcacaaaatccattcccgatggaggaataacctaatcttagaggtctagccctaacaacaacacagcagcctgctctttctttcaaatgatgctgctaaacaagcattcattcttcacaatcaacacagcacagcccagaacacaacagttgagctctcgaaccttctcgagactgtagg

SEQ ID NO: 299927 - DNA, 236 bp, Glycine max
tctatagaaggttcgttcctaatttctctacaattgcatcacctctcaatgagctggtgaagaagaatgtggcatttacctggggtgaaaaacaagagcaagtctttgctttgctcaaagaaaagcttactaaggcacctgttctagctcttcctgactattctaagacttttgagctagaatgtgatgcctctggagtgggagttggaactgtattgttacaaggtgggcaccct

SEQ ID NO: 299928 - DNA, 512 bp, Glycine max
  unsure (1)..(512): unsure at all n locations
ctgactatgantcnattgcanaccgggaaccgagcacgaccaggcacctgtaaccgccgccggcggtttactttatctttatcancnccgccagacgaagaccagggctctgagcaagctctgcaacacaccagananagncgcaaagcagaaggaggaacgggctgcagaaactaaacgacgaactggcaaaggagtgaacgctgaagctcgaactgggcaagatcaagctggaatagatggagctgcaatagaacgagctactgatgggggaatctcataagatgggagagtctttgaccttttacccttgggcttgcgaggccctctaaaagcgactgaagggcaccgacggtccaccacattttcttcatgaacgccaagtaatgcgtggctgagactcccacaagataatgaattcgaactggcatcctatgctcttgctaaaggagcaatgatagcagagaagactatcctccggagtattctgtgctacacacaaactaacagag

SEQ ID NO: 299929 - DNA, 411 bp, Glycine max
  unsure (1)..(411): unsure at all n locations
tataagaacaaaattgcctaaatcatttccaaatatgcatgtgaattaggaagcatcaacaagaattaagccaaggctattgtgcaagcaatcaatggggcaaaaaacactaaaagattatgatgatggatggctcaaattctcacaaaggtaaacttatcactttcaaattgagctttcaaaactatcatgacatgtagaggaaaaacaaggatttcaaatcacaaaatgtcaagagacttttattttcagaacaattacccattacttgaacatatcctataattcanagacaaacatgcaaatttaacacaacaaaactaacaaaattaaactaatttaacacaactaacaaaaccaaaaccaaagaacacactccccccccccatacttaaacaacacattgtcctc

SEQ ID NO: 299930 - DNA, 455 bp, Glycine max
  unsure (1)..(455): unsure at all n locations
agctngntatttacggatganaaganaaccgaaagtgaacgaaataaagatgaaagccaacaaaacaagaaatgaattgaaagtctcggattcgaaaacttatcggttgaagaacgaagaacggtgaagaacgacaaaaaatcttcatgaaattgctcacgaaaatgtctcggaagtgttacggaagcacctcggcttggattttcttcacgaaaacatggtttttcacccaaaacagttgaaatgcatagccaagggggttaggggccctttggaacagcccccctttgcctatttataagaaaaaggggaggaggttgccgcctagcangcccaggtgagctgagttgcttcctccttaagtaaccaagcttccanaattcgaaaaattgaaaatggctattngcacccncatcttgataagtcacccccttttcgtaattacgaaaaagtat

SEQ ID NO: 299931 - DNA, 401 bp, Glycine max
  unsure (1)..(401): unsure at all n locations
tgtcttataagctaaaatctacttatatacttaacttttatagatatcctctcatctaacttttccaaaagttgaagcaaataaattaatttaacttcttatagataaatttatccaggatgatcttgttatgtatttcttctttgggagattgtaagattatccttaacttacaatntgaatntatattctgaattatgtgagttatatataagtggtgttatgtttgataatggatttgtttattttagctctaaatatattnttattcttgtatcttttttagtctttataaaatatgtttattttatttttgtgttntagatagtactttgaacagtaaaaaatattctaaacaacgaaataaagactatttaaaacactttacagggacaaaaatg

SEQ ID NO: 299932 - DNA, 418 bp, Glycine max
  unsure (1)..(418): unsure at all n locations
ttagcttgtagttgtataaactaaagnnggnggcagcaatgaggaagatgcagaaacgggatccaacaaggatggtcaacctgataaccatcaccatcgttacctcaaacactgagcttctactaacaatggagaccatatgaagtgtgcaattttttatactgatttggtgcacagagggaagtcatctaatttaagggaattgaaatctttacctggcaattcggtaggtaaagttgaggtagatgctgatgatatagcatataataaagggaacaagcatattagtaaaacaaaacacaggaaaggtaagcttgatgacatttcaccaagtgggacagaaactgctaagatatacagcaaanagaatagtagtaatgctgactgccagaaagctaaacacaatagagatgctact

SEQ ID NO: 299933 - DNA, 424 bp, Glycine max
ttatatgacaataacagttattaaaagttggaagtggtgagctgattcacgacttttatttgatattagaaaaatcaaaatagagtcaataataaggagagttaacaagtgaaaattagagtgaatgagtattttattctaccatcgcaggtcatgtttggctgatgagcctatttcaaaacaacaacattttaggattaactagcatgatatgagatccttgccactacacgggtcactcgactgtttttgtaagatttataggtaataaatataaataatataatatatttccaattaattaaggttatcgctagaatcaatattaaggttaatgctagaatgaatatctatgtgatgagtatatcgattataaaaatctaaactatatcttctgtgttaacaagaataaaacaataagatg

SEQ ID NO: 299934 - DNA, 450 bp, Glycine max
  unsure (1)..(450): unsure at all n locations
tcttctccatttgatcacgcgatcttatatgatcatctccaccaccccaaaggaacctacgttgtatgcgcaccaatttgtccaccacccttatgggtaccctgaaaaaagaaaagaaataaattggaatagaggttaggattgattttataagagtgactcttcccccanaagatatgtgtctctgtttccactttgctagtttcctctcgtacttatagattattgngtcccacaactgacacctccttggatttgccccagtgggcatccccaagtaaacaaaagggatggacagcaggctacaattcaagtaattggctgcattntgcttccacgactccgacataccaatngatccgaatctgctttttgcannaattattgagacctgacaccaattcaaaggtcctcaagatggctttgatcaccctgatgttctncattgat

SEQ ID NO: 299935 - DNA, 409 bp, Glycine max
  unsure (1)..(409): unsure at all n locations
ctaattccttttatccttnttttcttttcttactaggggtnaatgaacaggttatcctgacatgcctttactctttattttactggatgacattttctagaataagggattaaatgatagagactatgaagggaggaaagcaaacaggaattatggtgcattgggggtggaatgaaagtggaaagaaaaggaagagaaatagtaaccttagaaagaaaaattcaataatcaattatttctttgcgaagttacttttttttcaatcaaatctaaaacttttctcttctccccactttttgtcaccacaccaaatgaccataaatgattgaaacttaatggagttactcttcaatgggcttatatgatgatctattttttgatgtattgtcatactaattgatagctttat

SEQ ID NO: 299936 - DNA, 337 bp, Glycine max
caacgagcccctggacaagttgcgagttagcgtagcatcacagcttcttgaccctgattacacttgctagtttgagacctgcaatgagtgcctcatactcggcctaattatctaaggcttagaagttaagctagagggctcactctagagtaacatcattaaggccttcgaggatgattcgtaccccgcatcctttcatgttggacgcactgtcaatgtagaggctccaccagtctagggtggtatggtcgttccagaaaatctgcatgaactggtctcatgggctgtaaggtcatactgagatccactctagagtctactgacatgcaacatctct

SEQ ID NO: 299937 - DNA, 368 bp, Glycine max
  unsure (1)..(368): unsure at all n locations
tgacaatgctgttaaaatacatatntcacgagataatttgatgcctcagtctgtttcacttttgcgtgtaaggatcccttgttcaaaaggatgggagcttctagaatggcttcgtttgccgtagatggtaaggtctgctatctatatncttctgtcactaaatgcttgctattgctattttatgacccttatttctttggtgcatgacatatatngaacttttattaatcattagtcatttgcatattagaggtagttgtttctagaacggattcctattcttgtaacaagcataatttcattatccctgtgctttacactagtgacatttagtcatttaatatttatctcaacttaattcttgaaat

SEQ ID NO: 299938 - DNA, 522 bp, Glycine max
  unsure (1)..(522): unsure at all n locations
gtgtctttganttcagcacntgcganngagccgggcccggganccncancgtcgaccngcngcangcaagtttatttttactttacacagacnaagcgaanaggncgggacagaacacaccccancaancgnaggaancaaagcagagaaagannncaaaacgcngaccaaccaaaccggagcaacaaagacancccgaancatcatacagaaaacaagacccaccacccgccaatgatcgaaacacaataaagcatgaaaaccatccagacttatggctttaacgctccccatttgactaacagtctaatgagatgtagtagcccaatgaagacaaccaacatccacataccattctgatgtaagctccattggagcttgcaagcctacgatcttcttcatcaatggattcctttgcttcttgcaacatgaatggctgcagaatggagaaggaagagagagaggacacgccacttcaatgacaacactagtctagaacatgctcaccaccatatgaaagcg

SEQ ID NO: 299939 - DNA, 338 bp, Glycine max
  unsure (1)..(338): unsure at all n locations
tgagatgaggaagtgttgaagggtgaaacttcctgcttttattgttgaccacagagtggtacctggagatatgtcgcggnggtcaggagaccttgnggacgtcaagtggggtgctattgcccaaaaccaagcttgaccaatcccgacccaacccgggcatagtcggtcagtgagaacctgtgatgtacctaaacaggcgagctcctggcagtcaacagataaaaggaaaacaagaccacaaagcaaggaggcttgtggtggctggccagctgtgaattttgtgtaatatgtggatggtggcctctggtaatcgattaccaagggtgggtaatcgatta

SEQ ID NO: 299940 - DNA, 425 bp, Glycine max
  unsure (1)..(425): unsure at all n locations
agcttatgttgtatattattgatgncaaacaaagaagtaaaaacagtgaaggatgatggtgtcaaaccagttgcgaaatcttcaaactcatggggataggcatcccaagtgatatgctgtaaagcaccacaaaaaatgggaactatattaggacttccaaaagaaatgctatgctggcttctattaaacatggaattgaactcaacgggattagtcttccaccctacaaggaaaggaaaccacccttcgaatttgggcttaaggcctaactcanaccggctnttaaggtaaggactaataaagccttanaaggactccattagagcatctctaatgggtgtaatttaagcaacctattntgagttgtttacattactgttaattgtcccaacaatgtcacatcanatttaagtaattcatatata

SEQ ID NO: 299941 - DNA, 302 bp, Glycine max
  unsure (1)..(302): unsure at all n locations
tagcccaagaggggatggaccttntcaggtcttggagaggatcaataataatgcctataggttggacctcccaagagagtatggagtcagcaccacttttaatatttctgatttaattccttttgcaggtggagctgatatagaagaggaagaaccaatagatttgaggtcaaatcctcttcaagggggaggggatgatgcaatcctccctaggaaaggaccagttaccagagccatgagcaagaggctccaagaggattgggctagagttgataaagaaggccttanggttctcatgaacc

SEQ ID NO: 299942 - DNA, 411 bp, Glycine max
  unsure (1)..(411): unsure at all n locations
ttagcttttcntttcccttganacacnngagggacccgaggtcattatgaatgacaaattccttgtgataaaggtagtgttgccatgttttcacagcccatattaatgcatacaactccttatcataagtagaatagttcaaggtaggaccacttaacttttcactaccataagcaatcggatggccttcttgcatcaacacagcctcagtccccacattcgaagcatcacactcaatntcaaaagattgttgacagtcagacaacgcaagtatggaggcattagatagctntttcttaagaacattgaaagcatcttcttgattctctccccattcgaaaccaacattatgctagagcacgtcattgacaggtgctggcaatgtgctaaaatccttcacatatcatctat

SEQ ID NO: 299943 - DNA, 451 bp, Glycine max
  unsure (1)..(451): unsure at all n locations
ttagcttgtgatctcacacgaaccttattgactgggtttcttcgaagcttaacctanaagaaggttaanagaagcttaacctcatttcttcatgaactgcaatttcgagtcgggaaggttcgcgccggccgggaagtcaacctcgggttgtagaagaacaagcttaaggaagtcaacctcgggttgtagaagaacaacctcaggttcaaaagagtgaacaacctangggcttgcttcanatgcgaaatgagcaacaaggttagggttcagaacagtgaactcaaatgcgaaagcaattanggttttttgaactaaaatttttttttttaatttgatttacgacggttttttaataataaactggcataaatttataacacanaacattctaagggtggtttcaataacccgcttagaatgtacgtcgtgaattccaantttcagtattata

SEQ ID NO: 299944 - DNA, 337 bp, Glycine max
  unsure (1)..(337): unsure at all n locations
tttctcttgtacttcctncttgctacaattgcaattgccagtgtttaaggtttgaccacatttcangcacatgcctttggacccaagaccacatactgaattcattgtaatctcaagatgcaccctggcccttatgttctttgaaatgtcaatttggctcttgtgtggaggaaaatataattgatcatccatgtcaataagtgcatcgtcgtcggcatccttaccactgtnttcagaggttgaaagttgtcttccccaaaaataacacccatatcaatagtctcttgttcttcaatgcggtcatcagtgagtaaaagtgagaactcagagaatatgc

SEQ ID NO: 299945 - DNA, 388 bp, Glycine max
  unsure (1)..(388): unsure at all n locations
tcaacagacctccaancnagaatggagagggnnaccactactggacaacccgaatgcaaagttttatcgaggcaatagatctaaatatctgngaagccataganatanggccttatatacccaccacagcagaaagagtttcaatagatggtagttcatcaagtgaaagcataaccatagaacaacctacagatagatggtctgaagaggatagaacacgagtacaatacaacctataagccaagaacataataacatctgccctatgaatggatgaatagttcacaagttcaaattgcaagagtgctaaagacatgtgggacactccttcgataacacatgagagaactacagatgttaaaagatctacgatacatgcactaactca

SEQ ID NO: 299946 - DNA, 200 bp, Glycine max
tgtacgcgacactatgcaatacataatcgggagacgtacaaacactgacttaaggagctatgtgcgaactatgtacgcaacaataaatgtgaaattggaggcgatagtgcaagagaatgagaaaatgctgtggaatgcagagtctgagagagtgcttccaactacatatgacacaagcacagccagagggcgatgactac

SEQ ID NO: 299947 - DNA, 267 bp, Glycine max
ctatactttaaatctttaattcaggttaccaatggttgacaaattaaaaaatcttgaataattctaaactattgatattaaaaaatatttattggggaactaaatttgctagtaaattcacatgaaattttatcctaattttcctaccacattattataatattaataaattttacctaccaatacatgtccacaagaaaatcgtaagtattttctggcattatataccctatagaaccgcaagtatttcctattgatttctttcaa

SEQ ID NO: 299948 - DNA, 462 bp, Glycine max
ctaaccttctagcgtacccgctattggtgctcagaaaatcccaaatttttatttctcttattactagctattttgaattctttagttcctgaatgtacaaccttcaaattgttgctcgttcccgtatatgtttcttgcaaaaaataaaattaatctgaaacaattcacgctgaattgttatcgttattattactcataccataaggaataacagctaaccaagtaatttaaaatgtaactcttaaattatgaggtatttttttaattacaattttacttcaatatctaatattgttaatctacttacgtcgttgtttacatataaatatcaatatataggtgatctactgataatataaagtactagctaatcacaaattatgatacctatcattttagattataactcaattctataaatattaataaacttataataagacaatccttaacatgtgctgc

SEQ ID NO: 299949 - DNA, 475 bp, Glycine max
  unsure (1)..(475): unsure at all n locations
ggatgagcccagaagccaggttaatancnttcganannncncnnnnnnncncgcgccnncnncaagggaccttcggcaagcagccngttatttcaaggtttttccctggattaagagcgttgataggcctttgagccttggttccctttccttgttttgaagctcactaccagccttaaatgaaaaccctgatattaccatatccctacggaattttggaactttggaattgtttgggaataagtgggggggggttttggttcattggacaacttggtttcgtggctatgcttcataagtattttggccctacttgatgacattgcatatggctaaatggtggacttctgaatgaaatgtgttctcaacgctaagagcaaaaaaacaaatcgaaaaaaaattctaaaaaaaaaaaaaaaaagcataaagtgatgaataaacttaacgcccagaatagaaacttggcttatctctg

SEQ ID NO: 299950 - DNA, 445 bp, Glycine max
  unsure (1)..(445): unsure at all n locations
gcttctatggaggctggctctgtgagcttcaatgaggtcctttttgttgatttttcaccatggatatgcagcggaagataaaggagaaaagctgataggaggcaccatccactagggaataagccatggaaaaaagagcttcaccaccaagagagtgtcttggataagaagattagagaggaagcttcattggaggaaaagaaagaaagagaaaggtgggggtgatgcaatcctacccnccaagggcattggatagaagactccaagaagattgggacaaagatgcaagagaatgccctanggttctcatgagccttanggcagatttcgggcccatgggctaagtatgagcccacttatctttgtatatattagactacgatgtcattatatttgatccttgtatttagggctccatattgtagatagggtaccctagaaatat

SEQ ID NO: 299951 - DNA, 343 bp, Glycine max
  unsure (1)..(343): unsure at all n locations
tgaataacggaagctcttgagaatttcaaatggtcataacttggcacactcgggtccgattcaagcttataatatatcgaagacgcctacaattaaacatcggaagctctcgagaaattcgaatggtcataattttccaaacggatgtccgaatccggcgcataatatgtctagacgctcgaaatcgaacaacgaaaactctcgagacattcatatggtcataacttttcctcggatgtccgattcagacgtatcacatatagagacgctcgtanatgcacatcggaagctcttgtgaaattacatggtcataacttttacacggatgtccgattcaggcgca

SEQ ID NO: 299952 - DNA, 508 bp, Glycine max
  unsure (1)..(508): unsure at all n locations
cggcgcgggttgatacgctcagtatcacgngacactatanantactcaagcgacatatggagcgcgcacaagcgatctacgcgtgtatcagaatcatgctatgtgctcgcgaatggtccccgatgtcccttcgcaacttgagttcattattgctaccccatagagctccgcgaaatgagaagcggccatacttttacttgcgagccctcttgggctgttgatcaagggctgttgcggtaagtgcattctcttaccggaacccggggcactcattccgaacgtgtgtaacatccaaagtgaacttctccgtggcgagttatgcctttcctaactcgattttgagagcttggacttnctcgtgatattcccgtgctataaaaatctcttcgatgacgacttttaacttggcgagccaatctaaacctcgtatgcgaactttcagccattcgtggatgatgcaagctccattggagcttgtaggactangatcttcttcataatggattcg

SEQ ID NO: 299953 - DNA, 413 bp, Glycine max
  unsure (1)..(413): unsure at all n locations
agcttttttgctctatttataggagctgacaagaatatcttcagacttatcaacacatgcacaggggccaaagatgcatgggagatcctgaaaaccactcatgaaggaacctccanagtgaagatgtccagattgcaactattggctacaaaattcgaaaatctgaagatgaaggaggaagaatgtattcatgacttccacatgaacattcttgaaattgccaatgcttgcactgccttgggagaaaggatgacagacgaaaagctggtgagaaagatcctcagatccttgcctaagagatttgacatgaaagtcactgcaatagaggaggcccaagacatttgccacatgagagtagatgaactcattggttccttcaaactttgagctaggactctcgatagggctgaaag

SEQ ID NO: 299954 - DNA, 327 bp, Glycine max
  unsure (1)..(327): unsure at all n locations
tcatgattgcctaagtgtggaccctcaagtgcaatcctttattcttctctttnttcggagccccatgaatgtcattgcctagcgctgttcatgtgtcctccaccttccagcttggtgctatatttcatgattgcctaagtgcggaccctcaagtgcaatcctccattctcccccttctttggagccccatgaatgttatttcctagcggtgttcatgtgtcctccaccttcgaatttggtgctatatttcatgattgcctaagtgcggaccctcaaggcaatactccattctcacactttcttggagccccatgaatgtcattgcct

SEQ ID NO: 299955 - DNA, 426 bp, Glycine max
  unsure (1)..(426): unsure at all n locations
agcttttatatatatgttcatagtgtatgctaactttgtctccttctttaattccaatccccactcggacttccaaaatagcagattctgaatatgataaaaagaaagatccacacattaatatttaagttttatagttattccaaccaactggggaaatttagattcatcatanatagattagtaggctaattttgcatatctgaccttgcagagtatataacagaatttgggccgatgtacttatacatganaaatgggtaggaagaaactaaagatatggaaagcaacatcacctgataaaggtatgtgattgactcaacggaagatcttctccaatggcaacaaggatntgccattcaacaagatcctgaccaacaatcatttttgaacatggatgatcaacctgtattaacatcccccatg

SEQ ID NO: 299956 - DNA, 429 bp, Glycine max
  unsure (1)..(429): unsure at all n locations
agcttcttacaacatcttgagggctaagtatatggaattcacctttgtttgttctgtgctgagatggntgatgaaaagttgtctgatgaaattttacatcttaattaaaccttaacaattttctcacccaacaaaactttgtatgccctccataaataattttatgtgctgatccttactctcgatcggttgctattggaggattttagtaatttaattatatggcataataaattaaaatgactatacatntgtttacttactcacaactctgtatggattcaaaggtgaattttactatataattaaataacttggaaaaattacagaaggaaacattcgaccacgtaatttcatataataatcttcaccaaaattttgtacacgttgatattgtcattgcactaattcatttataaacaatcaaat

SEQ ID NO: 299957 - DNA, 251 bp, Glycine max
aaatctgacttgccaaggttggggttggctctctgctgacacatacagactttgcgttcatgcacacctggacaatgacacttgaactatctgcaatattacataacctctcaactcacacaaatcacccagcaacaatatgactttcagcacgatacaacctgatggagaatacctaactcaatgtcagccttacacacacacagctgtcttcttcaaatgtgtggccaacaacatacatctcacatcac

SEQ ID NO: 299958 - DNA, 394 bp, Glycine max
  unsure (1)..(394): unsure at all n locations
tgccccaatgattgcatactgtacaggcatgaattttatgtaatgtccaaatgccctatctatgggacttcacggtacgaagtgaacgatgaagaacacagtagttctgatgaaaactccaacaagggccccccaacaaaggttttgtggtatcttccaatcattccaaggtttaagcgtccttttgctaacgaggacgacgcanaanaccttacatggcatgcaaatggaaggatttctgatggaatggtccgtcatccggctgattgctcccagtggaagaagattgatggtttgtatccggatttcgggaatgagccaagaaatcttagacttggactagccagtgatggaattgaatcatatggcaccttaagcactcaacatagttcat

SEQ ID NO: 299959 - DNA, 480 bp, Glycine max
  unsure (1)..(480): unsure at all n locations
ccccgccttaccttgtgangctttgaaccttgggaaccagctcgacccgggagtcttagagcacctgcagttagtcacctttctaacgttatgccagacagaacaacattttggcattgncgccagtccaagaagaactaatcttccacgcccatgaccccaaggggtggacgagttgcccgagtgtacgctgaaaaatacgctagaagaaaggtgatcaacttcttacatcaagagcaacaatgtggatggaccgatttgctcttactttgaacgggattcaagaacttcctcgattgctagccaaggcttaggcaatggtggacacctacttcgccctcgatgagatgcacagacttctccggtattggcagcatatgatagacttaatgggccatantattagaaaccactacgaagtttgtattggcactcagatcttgactaattataactttcttgaaaaatgagttatccatg

SEQ ID NO: 299960 - DNA, 453 bp, Glycine max
  unsure (1)..(453): unsure at all n locations
ctcagctaatgagcagatataattcaaatgatttaaagtctttaaanacagattatgtaaaaaaaaattgatttacagtccttaagcaaaattcttaatgagagtaaacagaattatggaaaaacgaaaaaaccaatggcatgaaatgctttggaatacaactctagattgatcacactcttgtcccttctcactcccccanatttccattttcatcccagacattaacgtgttctggattcatgaccttcaacagcgtacaccttaaatatgtaacttacttgttcttctttccatctttttctgcctcttgtttgaattgcatgtactgttcaagcaatttcatcgtaatcctctacttctgctcgtcttccaacaacctcatttgctcacgttcatggttttcctctgagcttgctttcttgatctgcaccaagccatcaatacataaaa

SEQ ID NO: 299961 - DNA, 414 bp, Glycine max
  unsure (1)..(414): unsure at all n locations
cgcctgttttaagctagtannttcctttgatagtgacagcggatatgaccacgttggaaaacgattccattaaaagactactaactaaaaagatcatgtggaccacattagtagaacaggggggtggcaggtgaaaacatatgcatgccttactatttaaagtttacaatatggaatatctaattatgtcaataaatatctgaaatacgagctactatgcttatttatttatctgaagatacctcgataaatttctaactctaactgcaagaggcttattttaactcgcgatacaatgagtttcaattgacccaaattgagacactacacacttggacatccacaattctcaaagatcttctctaagactggaaagaaagcctctacttggtgctgtattatcaccacatgaca

SEQ ID NO: 299962 - DNA, 564 bp, Glycine max
  unsure (1)..(564): unsure at all n locations
acaaccgacacagcaagcgcanctgcagaacacatttaatttnannnntannnnnnnnaagccgggggtgtgactccctgnannacgcgacatatanaaactcaagctntacnncggatnnnnacagcacaaatcaaacacacatactatatattccaccgcacacatacccactagagaaaaaaaccagatgaggacaaaactctatccactcacacgaaagaaacaataacacaagacaaaatcgcacacatcntatagaactaactacaagatatatcgccacacaacggttatcaaatattaaaagaaaaaaatgaacataagataatcaaagaatttacngaaagaaccaaaaacgaaagagaacaatagcccttccaaaaaagccaacaagaactgcaatcaacttacatattttctgcctaagaaaaaaacttaaacaatttctcatctcttatcttcatacactactaaatatctctaactctttaaaccttcaaagtgtcatacaggtcactgcccacctcaatagaaagagacaagaatgactacgcgtagcag

SEQ ID NO: 299963 - DNA, 398 bp, Glycine max
agcttttgttaatatattcgttctgaacttatcttggaattaattgtttcttaaaaaggaagtgtacacaaataacattttaagaaaaaaaaacttttaaaaaacaacttttaatgaagaaaagtaaaaataaaagaaaaagaaactgtagcaaaaagttaatattatgatcttttacttctatttctttttttccaaattataaaaattgaaggacacacaatttaaaaaattcaacttaataagtaatttctaacttaaaagatatttttattttctatgtctatattgttaaaaagtaatttagttaaatgcattcaaaatattttttatattattattaaatcttaaattgagatattaattaaaacttgtgacttcttataattattacttta

SEQ ID NO: 299964 - DNA, 321 bp, Glycine max
atgatgtgatcctgcctaagagcggatcgcttgatacatgctacaaagaattggatgacgccacttcccaagatggaagagaaagtatggtagacgccacaatgattaaccttataagtctgagattgggtcaacaagaaacccatagagaagctctcaccaaattttatgaaaatgcccatacttatagtgtatctgaacaaaacgataaaatagacatgggtcttctaaacagtttgtgccactattacaatttataaaaattatttatataaatataacatattggtatggccttcaaataatctggacttcaacaca

SEQ ID NO: 299965 - DNA, 401 bp, Glycine max
  unsure (1)..(401): unsure at all n locations
tctagcttgttngtgaagcttctatggaggctggatctttgagcttcaatgaggtagcttccttgagaagctttcttaagaagttagaacttagctacacacacccctctaataactaagctcacttccttaagaagtttccctgagaaacttccttgagaagcttccttgagaagattcctagagaagctagaccttatctacacacacccctctaatagctaagctcacctcattgagatgagaagctagagccttagctacacacatcccctacaatagctaaactcaccccattccaaaatacatgaaaatacaaaaaagtccttactacanagactagtcaaaatatcttgaaatacaaggctaaaaccctatactactagaatggccaatatatg

SEQ ID NO: 299966 - DNA, 447 bp, Glycine max
  unsure (1)..(447): unsure at all n locations
cttagagggcaaaattgagaaatgtgcatctactatatgttttttatgncgggaggattgagaaaaaagatataggaataggatcacaatgtatttgaggccacattaagtaaaataaatgtacactcattatatgtttttctatgttgccatgcacatgtgaatatctgtgattttcattcaaaataactcactgacactcatagtggcaatttagatgctattaatcggtaaaattaatttatctatagtaaatattgtctagaagactgagtttgacttgaatctgtaggattgaaacagattatctcctcacctgaagagaccatggatgatagtcatcaacaaaaagattctatggttggacctgaagataatactcttcaacacgccaatagaaatactcattatgaggagcaagcagaagcaaacaataattacatcaca

SEQ ID NO: 299967 - DNA, 388 bp, Glycine max
  unsure (1)..(388): unsure at all n locations
acaaaaagaagtggatcagatggtgtataaatcatgtagcgggcaccttcctacaaggaaaacgccctatatattaaaaacaccgtaaaaattagtgtccatatttctactgaaggtcgcaacaagccaaaggcttctttaacaagcatctaaattttaaatattggatgaaaacaattcaacaaaaaatgcatctaataaataaagcgagcttcttcatggtgtggtgtaaacacaatatggatgtgagaaagtaatttcgatataagaaaataacgataatgaattcagtatccaggattcttncagtagacttgattaatagaaaagaataacaagaaaatgagagaagcgttcatatggtaacacangcaggggacacagtaac

SEQ ID NO: 299968 - DNA, 455 bp, Glycine max
  unsure (1)..(455): unsure at all n locations
tctctagctactcttcaccttctatcaccatttctatntttgactatatcgaaggctnttgttggttactttgttttccacaagaaagactttaagtacacattctttgtcattttataatcaccaacccaacaattgggtaacttagatggctngttttttcatctgtcaatctatcctttcgaaatattgacgactgtgtttacagtgtgtttaaaacaataattaagaaaccttgacgctgaaattctagtattaaaaatttaatcattttgaagataactggttaagtgtttataggtgagggtcttccatatgtggaaattacattgagtttcaactaatatgagagacaggcatgcatgcatgcaatccattaaagggaatatgaatatcggaataaaacttatctccctattattaanntattttcanaataattataatcaacacat

SEQ ID NO: 299969 - DNA, 498 bp, Glycine max
  unsure (1)..(498): unsure at all n locations
cgccgaggccatgaagcattgtgacttccgtcgantccagctcggacccggggattctctagaggcgaactgcaagcctgccagcctaatctcaaatgtttaggttaacaagccaatccctaagacttgaactaatatatgccgggctaaccagagaattcaacctgagcctgcctcccttggaaaccaaaacaaggtaacaaaggcctgagcaacacttctaccccccacattcttccaattccattaggaatgaagaaaaaaaaattgaggttcggggttgcctccgggaaacaattctttcacggagacaatagttggtgcctaagggggcatataagacataaagaacacatcattcctctttctcttcttaagtagaaacttcatgaagtcatgcatcatgcaatgacctccaaccattgcctagaagtgtcgtgagcaagcataaaacgattaaaatgatcacttctcaagcatttcctgacataaatgtgg

SEQ ID NO: 299970 - DNA, 324 bp, Glycine max
  unsure (1)..(324): unsure at all n locations
ccaaccttcatacttgaatcttgtgatggaagccctctcttgaaatgactttatgagggtttaaaccagagcaaaaattgcttatggaaatcatccctatgtatactctcaaatcgtgttggttatgcacgagctcgaattacaagatctatgagtcttcgttgggcagcatgaggagctgtaactgcgagctcatgcacggctttgctggctcgtgtcgttagtcctgaatgagaaccccagaatatanctgcttatgacaatataaactaactggtgatgacaccccctgtcttcttcccctactgataacatcataatata

SEQ ID NO: 299971 - DNA, 427 bp, Glycine max
  unsure (1)..(427): unsure at all n locations
agctttataagcgcgggtttgggatactaaggtcaagtgttcgcgatatgcgaagatgatgttccgagtactttggatttggtacgaccatgccctcctgatttccagctgggaaattggcgagtggaagaacgccccggcatttacgcaacgagcataatgtaaacctttacggttttaaaagctctatagttgggcctaggctttagagtttntcctttgttaaggctttgtgtcttttgtttttgaatttataatacaaggatctttcttcatctgttcctatgtctctacccattctcattcatttgcatgtntacttctttntctgaaacggcagatccgatgacgagntccccgaaggtactaatacctgggacccgcctatcgacttcgagcaagaaatgaatcanacggaagatgaagg

SEQ ID NO: 299972 - DNA, 350 bp, Glycine max
tctttatttgaacgactgatatttgaatttaaggaaaaaaaaatagaagggattaataagaatattccttcaagggcactatcgtcgcagaaaaggagcacatgtaggtatttggattatcttttcctgtctaaccagagtgcgctaagttgcaccacttttagttgagataacgatcatttcaagactcggcgttaatctcatactgaatccttcattgaaatatataaaagacgtctcatgtccagaatttttaggaatgaagaatattaagtgaaaatgatcaaacatctctgaatagaaactctattaaaatcattggacgatatactatgcacttaagcacttca

SEQ ID NO: 299973 - DNA, 297 bp, Glycine max
  unsure (1)..(297): unsure at all n locations
tttgttcccttattnttctatgcaaaagnttctggtacataactactacaattttgctggcatggagcggtgacctggtgatatgtgctgcttttgtcatacaatggcattgttgatgacacatttgcattgtaggctgtaacaatgtgcaagcgcatgtgttctcctctttacataatctggcattcttgtatgtttgctgattgatgaaaaccacttatacaacaaatgtggatggagtggatacatatatagatgtatgtcctacctttgtttagtattgctctagcaaatctc

SEQ ID NO: 299974 - DNA, 318 bp, Glycine max
cactgccactgctgaatcttgattaccttgtgccacttgcatgaatgtatttctatacctataaaattataccttattaaaatggaaaaactttaatcactatttccttcttctaatatttcttgagtaaagtatcaaattagttctttacttttggaggcgttgtcaatttgaattctgaaacttaaaaaatgtcaaaatgatcatcgactctacattccgtctgtcacattagcttctgccgttagtagtctcttaacactgttaataaatgtatgatgtggcacgtgaacgcatacctggaacttttagatctaa

SEQ ID NO: 299975 - DNA, 428 bp, Glycine max
  unsure (1)..(428): unsure at all n locations
agctnttcatattatactgctgatctttagccaacacataattactagatttctaacaatatacatcaaatagttaactagattttgttatactttctttctggtggcagatgtgtgctaagacttggggcaagtgccttctctaccttaaaatttattttggaatatgcattattggtccactaaatattnttaatttcccactaatcaataagttatataaacatggaaaaaaaataaaattttgttacctgtaaactacaagataaaaaattatattattttgaaccccagacctaagaaacccccttactctnttgtctattctgcttttggtatgtgagagtcattgcctatgcatanaattttaataagaaatcagttgtagatagtaacttcttgatttccnctgtanaatatttcacatt

SEQ ID NO: 299976 - DNA, 261 bp, Glycine max
  unsure (1)..(261): unsure at all n locations
ttagtcacattaatcataggtgacaacggtaacatcttcccttagattcgacgaccacagacgacaatgacatccccccggaaatccggtggtgacaacgacattgccacggagatctattgacaatgacaacttctatggcttaagcaactttaacatcacattgttcatccacagnttaatggttaagtttgagccatcgtggaggtgatacatgaagacatggttgatattgtgtggaacatcctgaaattttcttat

SEQ ID NO: 299977 - DNA, 328 bp, Glycine max
cttgattactttaaagtttattgaccccctccaaaagtatattttatggggactgaattttgataatttccacaaacttcatttatgctatcaactaaatttccctcattggatcattctaattttaactacacaaatgataaaatattgaagttcctgttgttcagtaatattttaaagggaaagtttaataataattaaatacattagaaagtatttaaatacgcatgtgatgagtagcttatattaacaatttttatataaaagattatattatcttccggctatgtatgtcagaacactcaattagataacaaacacaacaatg

SEQ ID NO: 299978 - DNA, 447 bp, Glycine max
  unsure (1)..(447): unsure at all n locations
tgtgcagatcgaatcactcccgcatcttatctctatcatgtattctttctttctttacccactcctcacgtttggttttttagggaaaaacaccataactaaacgcgccacaaggcatccctatcgcaccagatccaaatctacaacgatgggtgatcaagaggagacacacgaacatatgaaagccgacatgtcggctttgaaagaacagatggcttccatgatggacgccatgttatgaatgaggcagctcatggagaataatgtggccaccgctgccgctgtcagttcggctgccgaagcagacccaactctcttgggcactgcgcaccatcctccctcaaacatagtaggacggtgaagggacacactgtggcatgatggcaaccctcccctangatacaaccgagcggcttacccttatggattgccgcccaactactcacc

SEQ ID NO: 299979 - DNA, 354 bp, Glycine max
  unsure (1)..(354): unsure at all n locations
caggtttgctagcttgtantgatttcgctccaattgaagggttcctctcagtgtggggtttcaacggcggtttgaggcaaccaccaatggttgtgggtggtggagaataagcttgggacattggggaagggttttggaaaaaagaaggagaaaggaatggttgctttccaaggctacacgaaaaataagacttgaaacactcaagtgtttctgctatcgggaaaagaagcttttctcacacaccacaagacatatcgcagatcgcaacggttagagccgtggaaatatgctctatgaacctccagaccaaatttcaataagatccaacggttaacgaatgcatgacggtgattt

SEQ ID NO: 299980 - DNA, 297 bp, Glycine max
ccttatcgacgattaacaacagcttttaatgaaaggcaggagaatgaatgccccccgaaaccattaactggaaacgaagttcatgattgggtaaacgacattgtaaccgtgtttgggaagtcccatttgaagacatcatctcgcaacaacatgtggaagaaacgcttaatattctttgatcttccatactggtctgatctacatgtgcgtcattgtctagatgttatgcatgtggagaaatatgtgtgtgatacgttaattggctctcttcttaacattaaacggaatacaaatgat

SEQ ID NO: 299981 - DNA, 414 bp, Glycine max
  unsure (1)..(414): unsure at all n locations
agcttttgattccttcaaacaacaataactttttactcggatgtctgattgacacctgtaatatatccagacgctcgaaattgaataccgaagctctgagcaaattcaaacgacaataagtttctacttgtatgttcgattgactctggtaatatatcgaaacgctcgaaattgaagaccgaagctctgagcaaattcaaacgacaataactttttactcggatgtttgattgagtcccgtactatatcgagacgctcggacttgaatgccgaagctctgcgcanattcaaacgacaataacttttttcctcggatgtctgattgagtcccataatatatcgagacgctcggacttgaatgccttagctctgagcaaattcaaatgacaataaatntttactcggatgtctaag

SEQ ID NO: 299982 - DNA, 430 bp, Glycine max
  unsure (1)..(430): unsure at all n locations
acacatagaatactaagcttcggattcaagtccgagcgtctcgatatattacgttgantttgtctgacatccgagtaaaaaagttattgtcgtttgaatatgctcagggcttccgtaatcaatttcgagcgtctcaatatattacgggactcagtcagacatccgagtaaaaagttattgtcgttggaatttgctcaaagctgtcgcattcaagtccgagcgtctcgatatattacgggactcaatcagacatccgantaaaaagttattgtcatttgaatttgctcatagctaacgcattcaagtccgagcgtctcgatatattatgggactcaatcagtcatccgagtaaaaaagccattgtcgtctgaatttgctcatagcttcggcattcaagtccgagcgtctcgatatattacgggactcaatc

SEQ ID NO: 299983 - DNA, 412 bp, Glycine max
agcttattaaaaactcaaggtctgcccttggtactcatatctccaaaacccaaggtccacccttagtacatattcttgctaaacccaaggttcgcccttggtacatacctctacagaactcgaggtaccccctcagtccgcttacatgtagcaactacaatgaccatcgtcaagggtccaagttcaaccaaacgaactaccaccccactattttgcaagacttttaattaggtcaaaaccacacctactcctcataaccatcagagatctaaatgtagatcaactctaatttgttattgcgatttgattacttttttgtttatggtgccctatgtacgaattcgagtgaagaatatgttcaattcacttgcattgtcataaaacccacatgtttaatatggattataatgac

SEQ ID NO: 299984 - DNA, 359 bp, Glycine max
atctgatcatcatgctttgataaatgcaaaaaatttggggcaaatgatgaaggtgagaatgatggaaaaacccatgctgtgactgccattcttatacagcccagtttcccaccaacccaacaatgtcattactcagccaatatcaaaccttctccttacccaacacccaattatccacaaaggccatccctaaatcaaccacatagcctatctaccgcatttccaatgacgaacaccacctttagcacataccaaaacaccaaccaagatatgaattttgcagcgaatcagccctgagaattcaccccaattccggagtcctatgctgacttgctaccatatctacttgataattcaat

SEQ ID NO: 299985 - DNA, 418 bp, Glycine max
  unsure (1)..(418): unsure at all n locations
tgttgcaagcttttaaaattgttgtctttcaccttctcgctaagccaatctggtggcatagagagcttccactaagcgcaacactcataggctaagtgcgaggaagactctggaagaagatgagccatacaggttcgctaagcgtaccgcttcatctcactaagcacaccgctttagttcatttgctaagtgagaaaggcacgcgctaagccaaaattcactaatgtgcgctaagcgcacgagcacgaacaaggccacctatntaagccttanatcagattttagagagggagtttggactgggattcagagctttgcatgtctagagattctacagagagaaaggtccaagtgctagagagtnttgagagattttgctgtgtgaagatctgcagagactatagcttgaacaagagtc

SEQ ID NO: 299986 - DNA, 453 bp, Glycine max
tgatagagttatcatcacatgacattttattggcactgaataagttgctttcgaagcaacatgagattgtaacagaaacactcggtaagctgtcaactaagttgtctatgggtcaacctacacactcttctattttgcaggttacaggttataccatctggggtgaggctcatgaaacaagccaatgtattcccactgaagaaaacactcaataaattcattatatgggaaatcaacagcgacaagggtatactcaaggaggattttcaggcctccagcagggtccctataatcaacaaggacagtggaggacacaccctggcaatcagttcaataaagaccagagtgggccttcaaacaggccaatccaacaaggacataacatattccagaggactactaagctggaggagatcttgatctcagttatgtaggtaacaatatcaaatcata

SEQ ID NO: 299987 - DNA, 360 bp, Glycine max
  unsure (1)..(360): unsure at all n locations
tcaagcttctttggagccattgcctgcaacgacacatccataaaaagttagtttgcatgaaatgcgtaaccattattntagttatcctaagtatagcaagcaagaagtcaatcaactntgtgtggtttttgctaattgcatgtgttaccgtgcaactaataaaacaaatcacaactcagtgcgcattatttcaaaagaaagaaattaacatcctacattaatttaggtgcaatgtgcccatcaccttggtttgttatgaagatgcatgtatgccccacaggatgtggtaaaccattatgctatagagtttaggtgttgcacatctgcttcaaatgttctttnttcaagtatttgatcccc

SEQ ID NO: 299988 - DNA, 439 bp, Glycine max
  unsure (1)..(439): unsure at all n locations
tccatcanaggtgcagatgacgatgttagtctctggatgctaccagactcttgagtctgacggatagcaaccaagacattttcgcagtctcggtcggaagacgctgacatctctgagaaaggtgcagatgatgacgttagtcactgcatgctatcggactcttgattctgacggataacaaatgagactttttcgcagtctcggccggaagacgctgacatctctgggaaaggtgcagatgatgacattagtcactgcatgctactagacttttgagtctgacggatagcaaacgagactttnttgcagtctcggccggaagacgctgacatctccaggaaaggtgtagatgacgatgctagtctctgcgtgtcaatgggctcgcttgcctctagctgacaaaaggtacggataaccataaggtatctccgcatatcat

SEQ ID NO: 299989 - DNA, 400 bp, Glycine max
  unsure (1)..(400): unsure at all n locations
agcttgtttgtggggcttctatgaaggctggatctttgagcttcaatgaggtcctttaatggtgattttccaccatggagatgcagcgaaagacaaagaagaagaggtgagaagaggcgccatccactatggaacaagccatggaagaaggagcttcaccaccaagatgagccttggataagaagcttggagaggatgcttcaatggaggaaaagaaagagggagagaaagagagaaggggggagcacgaaattgaaggaataaaagagggagagaagtggaactttgaagtgtgtctcataagacttttattcatcaaagttacaacaagtgttacacatgcttctatttatagactangtagcttccttgagaagctntcttaagaaaacttccttga

SEQ ID NO: 299990 - DNA, 430 bp, Glycine max
  unsure (1)..(430): unsure at all n locations
tcttgcttcttgtcataacagctntgcactcttcttttgttattcttcttggnatttgctccaaagttgttggatgacttctcaactaactacttggccacttgacccacctggatttcaaagtttttcagggctgattcagtactcttatggttggacatggccacttgcataaactgggctattgtctcctccagtttggtggtcctctgaaaaatatttggcccttgttgaggtggcctgttggaaggtccaccctggtccttattgagttgattgccaaggtgtgatcttcattgcccttgctgattatagggaccttgatggaaccccgaanatcctncttggtgtatccttgtctcttgtgatttcccatgtaatgaactctctgagtgtgctcttcaatgggaatgcaatgacatgattcatg

SEQ ID NO: 299991 - DNA, 427 bp, Glycine max
  unsure (1)..(427): unsure at all n locations
agcttgtttcatcatttatgcgagacatagaccaacatgctagccatcatcagcaagtaccaagaagaattaaatctagtcacgacccacgaacataaagtggcggacgagtatgcccgagtgtacgcggaaaaggaggctaggggaagggtgatcgactcgttacatcaagaggcaacaatgtggatggaccggtttgcttttactttgaacgagagtcaagaacttccctgattactagccaaggccaaagcaatggcggacacctactccgcccctgaggagatccacggactcctcagctattgtcagcacatgataaacttaatggcccatataattaggaactgctagaagtttgtatttgcactcagatcttgactagttataactttttgaataacatgagtntatcccacgtttttac

SEQ ID NO: 299992 - DNA, 362 bp, Glycine max
  unsure (1)..(362): unsure at all n locations
tacacttcaagcatacggtgtggcgtataacttctctctcggcaaatgtatatggaaaggccttttggtgttaaatttatgaggtttttcttattgccttttttttggcaaaaattgaagcttcgtgttgtttatggtctgaacagatcaagctgtaaattattaactgtattagctttcggtagtggtctctcccaaatggtttacaattccatattttntacaatgcttgtctttgaggcccaaattcatttacattggattctatctagactcattaatattttacgggagaaatgctaccaacacatgtaacattctttatatcggtcgatatttgttggatattgttcaacaatctt

SEQ ID NO: 299993 - DNA, 350 bp, Glycine max
gaagaagaagaagttctagaagatggttcaaaaggtgtggaaaaaggtatatcaaggtcataaaatgccagtgaagggcttgcttttatagactcttcatggctggtcaagaaaaccattgaaagaagtataaccttgagaaaatctaaagaaaaccattggaagaagtacatctcttgatttttattcaaaacttgtcactggtaatcgaataccaaaaccatggaatccaatacacaaagctttttatgaaaagatatgactcttcacaatctaatttgaatttcaacgttcacatacactggtaatcgattaccaatatattggaatcgattacacccatttaaaaa

SEQ ID NO: 299994 - DNA, 248 bp, Glycine max
  unsure (1)..(248): unsure at all n locations
tcataatagatgactagaatcttctcattatcccttctttccttgaagaaacatttggatgatttcttccatctggattcattggntgtttctctacatcttcctgatctttctgcagaataatgacanatcatctctcgtagcttcttcatattcataatcatcatcagaggaacntatcacactaactactttngatgatgctttangcaatgatttggatgatgaaggtttcttggtcttatgga

SEQ ID NO: 299995 - DNA, 408 bp, Glycine max
  unsure (1)..(408): unsure at all n locations
cgctatcttgngacgcttctatgaaggctacatgctcgatcttcgagcaagtcctttaaggggaattgccccctctggagagccgcgacctactataacaaaaaggtgcgacaaggtcccttcccttaggcactccccgcgtataatgaggctgacccacaagattattcttcgcttctaaagttcgaataggtgcctccttggaagcaaagaaagctgggttttatttaataggggggcaccccgaactacacggaataccttcatgcacaagagctaccttggactctgtgctataacagctgtctaccttccatgtgagcgcaagctttacacgagctgatatctatacactaggtctcatccttagaagactttgataatagactttgcttaagaacatacttn

SEQ ID NO: 299996 - DNA, 380 bp, Glycine max
  unsure (1)..(380): unsure at all n locations
ntaactnttaatctcagattctttggtttgactgagattctttatttggtttatgaaaagaattccctccatataattcaacgtttgacacctttgatttgatttacttgagtttataaaaggctcatgccacaaatttgtggcgtcgtctaatcatgtctgaacatgcaaacatgatgcatatgaaatcttaatattccaatcttatttttctttgcagatatatgatgtatgcattctatgattcttttttacatcttaaacttgatacgtcctaagtattttggaccaatgtcaattgtatatatctttagcacttctatgtgagatccacaaatacgtttacttgtggcatatatgacgtgcattctttcatgaat

SEQ ID NO: 299997 - DNA, 374 bp, Glycine max
  unsure (1)..(374): unsure at all n locations
tgttgcaagctntttatgagacctacttttggtgacttgtttcaagagaaggtattcttggttacaaacactaaacacaagggaccaacattccttaagttcattgcaagaagcaagatttgcttcttggttgatcactggacacaaaagaccaacgtcttttgggttcattgcaagaagtgggtataacttcttggttgttatcaatggacacaagggaccaacgttccttggggttcattgcaagaagtgggaataacttcttggttgtaatcactgaacacaaaggagggaagtcttttgtggttcattgcttgtaaaggaaatttacaagatagtggaaatctcaagcgggttgcttggngactggacgt

SEQ ID NO: 299998 - DNA, 456 bp, Glycine max
  unsure (1)..(456): unsure at all n locations
ctattaaattanatagaccagacttagacttattaattagttgtatgagccngataggcctatatatatgtatatatatatatacatacatatatatctatatatatatatatatatatatatatatactattttttgttccaagaagactctaatcggggtgagattgactctccttttcctttaacttgcctctcacgttcctactctataaaatatcaaatatttatcgtgaataatacttttaaaaaggctatcactccacgctcgactcttaaagaggtcacacccgacccaaacaagagtctctgataggctatangccagactcacgccctcacaaatcatcgtagactacgctcagggctctcacagtctggcctgacctattctcatccgctattagaatgtgaattacacacactaaaatacactactttcacactacacggacta

SEQ ID NO: 299999 - DNA, 370 bp, Glycine max
  unsure (1)..(370): unsure at all n locations
agcttttcntttgtntgattttcatacaacaacctgtctggtttggcgcctggtaccggtcaattcagctacttcaattacacgtctttcttgggaaaccctgacctctgtggcccctatttgggtgcttgcaaagatggggttgccaatggcgcacaccaacctcatgttaaaggtctctcctcttcttttaagctgctacttgttgttgggttgctactatgttccattgcttttgcttgggctgcaatattcaaggcccggtcactgaagaaggccagtggggctcgtgcatggaagttgactgcgttcaacgtttggacttcacttgcgatgatgttttgcattgcttgaaggaggataatattat

SEQ ID NO: 300000 - DNA, 434 bp, Glycine max
  unsure (1)..(434): unsure at all n locations
tgtatgacatgagaaaatactagtaaacaattcttgttgatgggtttggcttaccgttgagagatgtttaaatagttattaaataaaaaaaatttaaatttttatttcttataaatgtgtgtgaaaatgtgtgtccgtttaatctaatattaaactaaagacactctaaatttttataacatcatctaatttggttaattaaataaagtgtgtgaattattataagttntttatatttatttttaatttatatgaataaaaataataataacattgtcacattaatctttacaactaatagaaatattaaataagtctcttgaatatttaataaattcttaaatctaactattgatcatcattttaagtcataaactatatgtaatattatcattcaagtgatctttttttgaaattgaactaatgtgatttca

SEQ ID NO: 300001 - DNA, 408 bp, Glycine max
  unsure (1)..(408): unsure at all n locations
agcttttcntcaggcgatgggtagttntggtgacacccaaatgccctcccaggggtgttgaatgatgttcagtgatgacactatgaaggaatgggttatcctgattgagccagattcgacccttgaacagtatcagcccgtgaccgagagtatagtcaggatggtcattagggttatcacgaatggcttgagcaaggcgttggaactccgagttagagtcgagggattgcttgatgtcactgangaagtcaagctggggaacactaaagacgagcaaggaagcttcaggagatggagctcgggaaagagcatcagcgatcacgttagtggcgccagacttatactgaatggagtattcgtaacctagtagctttgaaagataatagtgttgctctggtgtctgtatga

SEQ ID NO: 300002 - DNA, 453 bp, Glycine max
  unsure (1)..(453): unsure at all n locations
tgcanaccanatgctcaccactgctagacgaaaagttctttttgtggttcatataaacctcctgctctaaatcaccattaagaaagattggtttcacatccatttggtgcaactcaaggtcaaaatgaacaactaatgtaaagataataccaagataacctttattagatacaggagaaaatgtctgtgtaattgattcattctttttaagtaaatcccttagcaatgagtcttgccttatatctttcaatgttgcctaatgaatcccttttggtcttaaagacctatttactgccaatggcctttgccccattangcaactctacaaggtttcaaactccgttactctgcatgaaattcatctcatccttcatagcatcataccatanatntgactctttacaactcatggcttgctcanaagtttcgggatcattttcaactgcaatatta

SEQ ID NO: 300003 - DNA, 389 bp, Glycine max
  unsure (1)..(389): unsure at all n locations
agcttttgcagttgttcatcctctttataagcttctgcaagtgccaaatacgattccccaagcaaaagaacaagcttccacaacttatgatccaacttggatgttggaagccattctcggatgtcacaaacttcaatacagtcagcatctccacaggcacaaacagaaacattaaaagatgatggtctatcacgattttcattgaattgatccatcacctccggttcagtgctctgaagctgacgcatccatctcagagacttaatggcctgtgaaacatgatgtacggcagctaacttggatgagattggatcagcaactgtctgaaccacaggtgtggaaactggacatacttcacaagccanagagctatcatcaggatacaagct

SEQ ID NO: 300004 - DNA, 428 bp, Glycine max
tagcccaataatattgctaacaataatggtaatatctatatttcttactcccctccctaaactatagttcacttagcatcacacttgttacaaagtattaaaatgtcgcaacatctttaatgtatctcagaatattgttaagatcatattgcaaggtatgaaagttgagtctcacattgaaagtttggcatttaatgtagggttttttaggccttcaccttcatttttccaactacaattgatggcttttatggtgtagttctggtagggtcttaataattggtattagagcttcttcagtgttgttaaatggtggcgctacggctaccatggctgaatggcatcatggtttttttgtcaaccaccatcaggaaattgtgaagggaggccagttatggtggcttctattagacaatggcatctttata

SEQ ID NO: 300005 - DNA, 381 bp, Glycine max
  unsure (1)..(381): unsure at all n locations
agcttgtacgaatgtaagacacatcttcttcaacctttgtgattcttgactccatttcattgaagcgcaaatccacttgtaattccaaagtgtcaaacctttcaccaactggttcggcaacaatccgtgcctacatccaatccccaagcaacctgcggtccttgagatttcttttcaaccttgtaaaaatcttttaacaagcaaagatccacaagggatgtaccctcccttgttctctntgaacctagtggatgtaccctccactagaactgatccacaagagatgtaccctctcttgttctcagtcaacaacccaagtagatgtactctctacttgtaccacanaggaatgtaccctcaatgntgtaagacatagatctc

SEQ ID NO: 300006 - DNA, 452 bp, Glycine max
  unsure (1)..(452): unsure at all n locations
tattctatatatagcctttatctncaagtatttgttgtcttatcttgatnggattcttcactttgttcttcgtttgaagtcttgagtccattgaagcatttaatgctttcttcatgcaaagttcatgatgaaggggctagtgtgctttgtacttcattagggaagtcacttttttcatcattgcaggtctataacaataaaatgcaccttttgatgagggtcagcgtcttccaaactgtggacttcatttattcttcatangactttgacagatcctacgagaattttttggcatgaaagaatcttagacagagagtattaaataaaggtcttaagttcactacttaaatgttatataagatcgtcttatgaatgcatcgtatgaaacttcagacgtacaaatacaaattatgatctgatagcatattagacacaacttttatcatttgtgt

SEQ ID NO: 300007 - DNA, 413 bp, Glycine max
  unsure (1)..(413): unsure at all n locations
tttagcttttacatgaagnaactagctcgcctaggtgagctgagctcgcctaggcgagcatgttacttcaggcttaagccaccagctggcctggacgagctgggcggcaagctcctcccctattttggctataaaagggcgtgggaggctgaaagaaagggttcaacaccttgggaaagcatatttcacttanaattattgaaaagaaggagaaagaagatgaaaatcaaggtcgagggtaacacttctgtaaccaaatccgtgaatgttctttgccattcttcgtcccgtcttcatcggtcatcgtccttcgaccggttatgttttcaattttaagctttgaattcattntattgcaccttangngtccattcttgctttgtatgttntcatcttcatcttggctactttcg

SEQ ID NO: 300008 - DNA, 432 bp, Glycine max
tattgggaaagacactagtcttagctgggatggtttgatttaaccattgctgctaatgatgaatggggggaagccaaaattcaagtgtgtattatttaactaaaagagtttctgtgcaagccagtcttttgttctttatttgcgattttgcttttatttctttttcttttttcttgcaatcttatgctagcttctctagactttgcttttaatcatagtatctcattattgattttctttttcgctgatgataattgcgagtggctatcaatcattttactaaattcttgctcagttgatgcagttctgttctatctcattatgtcccttcttgtccttcatttttcgcacgattataatttataaattaattgcaccattgacccactagaacaacctatttttcatggaaaatataagaatctgatcaat

SEQ ID NO: 300009 - DNA, 397 bp, Glycine max
  unsure (1)..(397): unsure at all n locations
agcttttggtcaatctgaggagtggtgtcttcatgctgtaaattgatggtttctgggtggaaaatcctaatttggttaagccagaaattctgcagcatttgcaaagcaaattcaaattaattgaagttatgtacaagcactgcagcttttacaaaaataagcactgcagcttatttaaggcagaaattctgcagcatctgcagtatgtgggtggaaaaagggtgggagtggaactttaaatggagaagacactngtttgacagagagcttgagatgacagattgtttccgtaatgatgttgctggcagcagtattcagattcacaaaanaagatgagtggatctggaaaatagaccctactggataatattcggtaattaaaggagagactacaaac

SEQ ID NO: 300010 - DNA, 445 bp, Glycine max
tctagccaaatggacttaccttgattaattcctttgtatcccttttgagccctggttccctttcctttgtttgaagctcactacaagccttaagtgaaaaaccatgatatcaccatatccttaaggaattttggagctttggaattgttttgggaataagtgtggggggttttgtttcattggacaacttggtttattggctatgcttcatgatgtattttgggccatacttgatgtacattgtatattggttaaatgttggacatgctgaatgaaatgttgtttctcaaaggctatagaataaaaaaaaaagaataaaaaaaaattcaaaaaaagaaaaggaaaagcaataaagttgagtgaataagatcttaaatggcacaaactcttcatggttaattcttatctttacttctttttattctcttatctttttcttaatatg

SEQ ID NO: 300011 - DNA, 372 bp, Glycine max
  unsure (1)..(372): unsure at all n locations
tgcagcttgttttcaaaacctttgagagtgtgaccttaaactgtgagtgaacggctagctgtgagtaataatctttgcatgaatctctgaattttagaatgaaatgtataaatgaggacatgatgaaggccatgattgtacatacacaagctctctaaccaaaaaccttaccttgaatgataattgcatcctttgctccctgtatangctgaatgattttgtcatgaattgaaccctgaacttaaataattatctcctaatacctttgttagattctaggagaacatatggttcaagacaacattactctanatttgggggagaaaagtngaacagaatgaanagatagatgtaagcatcagcacacacaac

SEQ ID NO: 300012 - DNA, 289 bp, Glycine max
atatatatatgacacatcagatgaggataaaaaaactcaattaaatttatgattgtggtatttcttccaatagtttggtgtgagacaaatctaaaatctccatcattaccatgcttgatagctgctaaagaattgttgaggtaagcatgcccatgcctacttctatcagtctaacatgttgaaatgtcggagcttcgtgcatcaagcaatcctctggttatattttataaaagaatcagttctattacagaacagtataattgccacgaatattctttcttgttttatg

SEQ ID NO: 300013 - DNA, 372 bp, Glycine max
attcttaatagaagaccttataaaaaaaatttaaaaaaaaatctttatgaactatggagaaaaagaaaactaaatctaaaatatcttaaagtgtgggggtggctaataaaaggtaatatccctattaataagaaatgaaaaattgaaaaaaatggtaattggattttggtggatattttttacataatactacttatagattcttagtttgtaattcagaagtaactgaaatttctaatgttactattatgcaatctagagatgttacttcctttgaaaatctttttccttaacaaataaatccgtaaatctttatatggtttgaaacaaactcccaaagcagtacacaaaaagttgattaagttattcttt

SEQ ID NO: 300014 - DNA, 450 bp, Glycine max
  unsure (1)..(450): unsure at all n locations
ctaagcttctaaggaggtgagcttagttatgagaggggtgtgtgtatctaatctctagcttctcaaggaatctttctccaaaaagcttctcaaggaagttttctcaagaaagcttctcaaggaagctacctagtctataaataaaaacatgtgtaacacttgttgtaactttgatgaatgagagtcttgtgagacacaactcaaagttcaatttctctccctttttcttccttcaatttcgtgctctcccctctctctttctctccctctttcttttcctccattgaagcatcctctccaagcttcttatccaaggctcatcttggtgctgatgctccttcttccatggcttattccctagtggatggcacctcctctcacctcttctnctttgtcttccgctgcatctncatggtggaaaatcaccattaaaggatctcattgaagctc

SEQ ID NO: 300015 - DNA, 311 bp, Glycine max
  unsure (1)..(311): unsure at all n locations
taagcttttttgctcgnattaagcgcacgancgggacacaggtctagacactgaagactttggttgatctattgcgaaagcaagaagcaaactcgttcttgacagagcccttcttaaactcacacaagctttctgaatatctcttgatcaacttccaatcaattatggcctttaaatacggtacaccgatatctaattatcatcctaatcgatgacaatacactaaagagaagcctaattgatacgaccataactaacagttatgctaagtaataacaaaaatgatatccctaattataacatcttatctg

SEQ ID NO: 300016 - DNA, 240 bp, Glycine max
attcccagaatgaacttgggacctttgccgacctatgcgagatacaaattcatccgatacaactagaccacatgccttattatgcaaattctgtagcttgcgagttatattaataactaacaaatccatgtggagaaattatatacagcatagcctgacattgagacttggattctgcgtgatacacttttaccacgtgacaactctaaaatggagcgttctctttatcaccgcaagctg

SEQ ID NO: 300017 - DNA, 413 bp, Glycine max
agcttattaacagttgttgcaacaattatactatcatttgaaaaaaaaaatgtgaaatcataggagcaaaattggaaaccttaatgccatgaatcattatttgtttaattgattggaaatcatagataacagtatttcagtaagacagtaaatgagtaaagagaaatatgtctttatcttaatcctacgtggaacctaataaaacacaatagaaagacaacacattttactatcaaaacaatccatatgagaatttattaaactttttgatgaataaccttcgtttgatcataacaattcgtaatagtcatttttgagatattgataattaattgtaatatcattcgactattcttaggatcattgattatacctataaataatataaaatttttttagtcgtcaatgatcct

SEQ ID NO: 300018 - DNA, 213 bp, Glycine max
ctatcagattcatccgcgcgagaatgcgaatcgaaaaaccctcctttgtccctctcccttctctcaaaccctcctccagagggtttcttcgacgcagcccaaatatcagtttcgtcagcgcgcgaaaggggaagctcccgattggatcccttaccccaaaacatttctgctggctcgtcaaaaccctaatgaaccccacgggattgaagactc

SEQ ID NO: 300019 - DNA, 401 bp, Glycine max
  unsure (1)..(401): unsure at all n locations
agcttttctctaaatttaaaatatgcatcaaacattgccatgaaggtacaagttgatgattcatggctatggaattgaagatttggccacttcaacacacatgccttgaagttgttacatgagaagaacatgatgagagatcttccaagcataaaggagaacaatgaagtgtgtgaaggatgtctccttggtaagcaacaccgatttccttacgcaacaggcggagcatggagagcgaaagatctattggagctgatacatacggacgtttgtggaccaatgaggacgccatcacatgagaacaacaagtacttcatactcttcattgatgacttctctagaatgacatgggtatattntctaatagaaaaatcaaaagtctttggagtattcanaaagtt

SEQ ID NO: 300020 - DNA, 450 bp, Glycine max
  unsure (1)..(450): unsure at all n locations
ttgtgccanaatcccaactcaccataaaccttgacccgggatgagaatttccatcgtcgccctcggaagaaaacaaaaaaagaaaaagaaagttcccgatcaaagatcggaagaaaacaaaaatagaaaaaagttcgcgatcaaagatcggaagaaaaaaaaagttaccgatcaaagatcggaagaaaccaccacttgaagtggtcctctccctttgattgccaaccaaaatcttgtgcactagtgacattctcgtcccgcactaaacaaaaacagaaaagggaaaggccaaaacactcagccaaatttctcaccaaaacaccattcccgaaaatgtcctattgatccatgatcatgcatgtaatctttgatttgataggaaatgattttcanaatcaagtcatgacatatctatgggttggaattaggataaaacacttgcctatgtga

SEQ ID NO: 300021 - DNA, 409 bp, Glycine max
tgtttaaatcattcaaataatatagctcattatctagcactaatttgcttatttaattaaacacaggcatttaagtcattgtttaacacaataaacttcaatcatttatgattacgcatgattacacttgcacttgtacatatataagcactcttctgaaagattaaacgtactgccgacaaactaggccctcctcccacgacagaaactatcatgtggtctacactctaaactatatagactgtaggcagtattacatgacagataaatgatgctaattgttcatcaattgcaattgtaaatgttacatatattttcgcgtattgtagttgagttgtcttacaaagaacactagttcatgtcagtagatactctctcaaccctgactattcatagtactataagttgt

SEQ ID NO: 300022 - DNA, 442 bp, Glycine max
  unsure (1)..(442): unsure at all n locations
cgcacgtcgattgtgatattccgaatgagaagagggtgatttcctttgagatcctggtactccgccgcatcaacgttggccacatnttagccaactatagacatcatgtgagtgaacagtaattagattactgaaaacacgtaattctgtgcgatgtaacttgggacaattcctttgagtatgtctactaggctagatacactggcgatacatatggatcctattatgattgacattggaagaatatacaatgacgtacggcatattctaactcagatgataccatatcaactgtgtgagaaaagagctgtacgtgacctttgacccgttaatgacgcatcatttatatttgttttgtatcaaattcactcgtacagatccgccaacatatataagaacagtgtatgatcgtagattaacaactgcttaccggatcccgacn

SEQ ID NO: 300023 - DNA, 407 bp, Glycine max
  unsure (1)..(407): unsure at all n locations
agctngtaatattgaacaacggaagctctcgagaaactcaaatggtcataacttatcacacggacgtctgattcagccgcataatatatcgagaagctggaaattgaacaacggaagctctcgagaaactaaaatggtcataacttttcacacggaagtccgattcaggtgcataatatatcgagacgctcaaaattgaacatcggaagctctcgagaaattcaaatggtcataacttgtcacacgaatgtccgattcaggcacataatatatctagatgctcgaaattgaacatcaaaagctctcgagaaactcanatgctcataacttatcacacggatgtccgattcaggcacataatatatcgagacgctcgaaattgaacaacgtatggtgtcgagaaattc

SEQ ID NO: 300024 - DNA, 443 bp, Glycine max
  unsure (1)..(443): unsure at all n locations
tgaatttgacaacagaagctctgagaaattcaatggttattacttatcacacggaagtccgattcaggtgcataatatatcgagaccctcgaaattgcacaacggaagcccttaagaaagacaaatggtgataacttttcaaaccgaagtccgattcaggtgcataatatatcgagaagcttgaaattgaacaatggaagctctcgagaaattcatatggtcataacttatcacacggaagtccgattcaggcgcataatataccgagacgctcgaaatngcacaacggaagccctcaagaaattcaagtggtgataacttatcacacggaagtgcgattaaggcgcataatatatcgagaagcttgatattaacaacggaatgtgtcgagatattcaaatggtcataacttatgacacagaagtccgatcaggcgcataata

SEQ ID NO: 300025 - DNA, 416 bp, Glycine max
  unsure (1)..(416): unsure at all n locations
agcttattcttatggactccctccggacttcaccccccgtgccaccccggaagatttaagccaagcccctactttcgaggggcaactcccaccttatgaagactatcccgggcaagacgatggggaaggagatacccatcttggccccctgctccacctcaaagatccgtccccacatgaactaccccaactgaacatagtccgccatatcccggcctcacccacacccgtaaaaggatctgttccctttgcggaagataagggaaagattgaggcgcttgaagagaggttaagagcagtcgagggccttggcaattacccattctcggatttggcagatttatgtcttgtgcccaacatcgtcatccctcccaagttcanagtaccagactntgataagtacanagggacgacat

SEQ ID NO: 300026 - DNA, 408 bp, Glycine max
  unsure (1)..(408): unsure at all n locations
acacttaaaactaagcttgagntcattcttgttcttctctttgttctcatgatttttttactaacgttgagnttcttcttctgccttgtagagctagatcaaacatcacttggatgtgatattcaattaaagtactaaggataacaaagttgatgggggcaacatttgagttgctagaaaagacaacaaaaacatcaagaacctcctttttcactgaagaatcttcatttgaggtgttagcctacttggacgcaggttcaagttgacatattaaaataacctcaacaaccttggctgcattggactcaacttgttcgttaactttttgcattacaccagagattgagagatcaataagaacacatcaaatatatgatgtggcaatgaggtgtagcaagcaaatgctca

SEQ ID NO: 300027 - DNA, 413 bp, Glycine max
  unsure (1)..(413): unsure at all n locations
agctttatggcttgttattnttcaatcataatagtagcaggttcgatatctcttcatcatttgaaaaatttgtaacaggagatagtgtggcagaagagtaaggatatctatcttcccaaagtcttggagggcaattaggcctttgttctggattttatgtcatgatcctgacatgtaagtgtatcgtgtttgagctccaattataagctcaacaagctttgctgtaacatacattggaaaaacagatcagatgcttaaagtagtctatcaagctganatgatgatgacaagaaagtaaggcactaaaagggaaacaaagcaaacaaataagtatgaagctcacctgtgagaaatcccatgacaggtataggttccanaactttctcagtgctttcaagtctttgcctaaaaca

SEQ ID NO: 300028 - DNA, 421 bp, Glycine max
ctgcacatgcgtgaaggtcttttcctgcacattgaactacctatattttcctaatcagctcattcaatgaaatggaggtgttattgataccaatgcccacagtattttgtttcctcaagcgagattagctctatcttgcttcgttcaatataccttctttttgatagcgaaaaagacttgatggtcgaatctaattaccactcacaacttaggcaaaactttacgtagaaatgagttatcctaaaatataaaccataaaccaaaagaccggatcagagaacattcagactgctattcaaactcatacatttaaatgtaccttgtcaagacttcatgaacataagaaacggtaaaccgaataaagtactgaaattggctgtaaagtttaatacaggactatcttgcctacatattttctgct

SEQ ID NO: 300029 - DNA, 378 bp, Glycine max
tcaagcttttatgcaacatatggagaggttaatgaaacaacgagatgatgcgctccatgagaggttggatcaaatggagaatagagatcataatgaagaagaaaggaggagaagagggaatgatggtgttcctagacaaaaccgaattgatggtattaaactcaacattcctccatttaaaggaaagaatgatccggaggcctacttggagtgggagatgaaaatagagcatgttttctcatgccacaactatgaggaggaccagaaggtgaagcttgccgccacggagttttccgactatgctcttgtgtggtggaacaagctacaaaaggagagagcaagaaatgaagagccaatggttgatacatggacggagat

SEQ ID NO: 300030 - DNA, 404 bp, Glycine max
  unsure (1)..(404): unsure at all n locations
tgaatcggacatccgtgtgaaaaggtatgaccatttcaatttctcaagagcttccgtagntcaatttcgagcttctcgacatattatgcgcccgaatcggacatccgtgtgaaaagttatgaccatttgaatatcttgagatcttccgatgtttaatttcgagcgtatcgatatattataagcctgaattggacatccgggtgaaaagttatgaccatttgaatttgcgagagtttccgatngttaatttcgagcgtatcgatatattatacgcctgaatcggacattcgtgtgaaaaggtatgaccatttgaatttctcaagagcttcgggtgttcaatttctagactctcgacatattatgcgcccgaatcggacattcgtgtaaaagctatgaccatttga

SEQ ID NO: 300031 - DNA, 401 bp, Glycine max
  unsure (1)..(401): unsure at all n locations
agctttatcttaatattttccaaatcatcaagaatcttgttgaaatcagccaattgttcagtggctgttcttgactctgtcatcttgaaggtgtacaattgttgcttcaagcatagccgatttgcaagggactttgtcatatacaatggctctagtttcaaccacattgaggttgttgtcctttctcttgcaacttctcttanagctttatctccaagcaatagaatgattgcacttcgggatttagcaatcatctctgatttctcctttgagcttagagattcaaacatcctttcttctcctttaagagcttctgcatagccatgttgaatcaagattgcttccatcttgattctccataacccgaagtcattttcccttanaacttctcaatatcgtac

SEQ ID NO: 300032 - DNA, 455 bp, Glycine max
  unsure (1)..(455): unsure at all n locations
ctatagaatactaagctctgtccctcacgtattgaaggcactttntttgctctccttttgtcaatngataatggtggacttctcttagcatcatggggtggtggctttgttctccacatgctcaggatcacaaaaacaaagtttgataacatttggttggcgattttgatccgcaacattttaaggattgctccactttggctcctgtttttggtgcctagagctgaccgcagctcttcaattcttccatgtaaaagcatgaattcagaggtggctatcgacccttcagacaccaaaaatgttgaattggtgtcccttgtacacagtgttgatggtaaatagtggaatgaaaagacattcttttggattctcaattccaaatacacgaaattaccaagccagtgtagaattaaacgtgcaatttgtttggatttaatgtggaaaaaaaataagat

SEQ ID NO: 300033 - DNA, 401 bp, Glycine max
  unsure (1)..(401): unsure at all n locations
agctttttttcagagacttcttgncatatatatcaagacaatgttcacctccagaacattttattggagaggaacattgagctctctacgggcatgtttgatgaattttacagagagctacaatagaggcagtggcaccgagtactcaccagactctcggaaaagcaaatagacatcgctctggtcaaagaattctactcaaacatctatgacccaaaggatggagctccaaaatattgcaaggtgcgggggcatgtgatcaagttcaatgcagagaccattaatgatttcttgaacaccctggtcgtccttggtgacagagaggaacanttggcatactcctagtacttgcacacatacccagaccaccaagcgattgcggaaccttatgcacacccgga

SEQ ID NO: 300034 - DNA, 456 bp, Glycine max
  unsure (1)..(456): unsure at all n locations
ntaattcattcagaaatggccaaactcttgaacaagaagtttgtgtgcctatgaaaaccagacagaaatcgtaaaaaagaaagataggggacgaatctccaaaagacaaagtaagtggtagacggaggtagacgaccgtgaatcataaaaaaaaaaaatgagagaaaaatatatatgaattgtaaaaaaccaataatcgaaaatatgcagaattggaaccttgagaacgacaaagggagatgcgtggtaacaaatcaaggttttcaacaaagaattttaagacggtggggatgtgggaggctgaaatcaaaggcacgtgattgagtaaaatattttaattagaattattagattaanattagatcaatgcataaggatttatgtaactctcttagaattatatatactggaatttaatccctttctcatatatattggtaacaaaacgtattgtaa

SEQ ID NO: 300035 - DNA, 294 bp, Glycine max
  unsure (1)..(294): unsure at all n locations
ttctccctgcctctatctcaatacacacacaagcatacaaaacatgggaataaaaaaaaaaatagcgaccgaaatgaaataccaataccacacatccaattagaaaaaataataaccggccctaatntaatatcctgatttctcaatatttattatttaagcggcgggaccctttatatacagtttaattcggccgccagctttgtcgtctctttcgtctccgatcattcccgtacgtcctttgcagttgactctcattctctttctctctctacacctctctctctctctctc

SEQ ID NO: 300036 - DNA, 411 bp, Glycine max
  unsure (1)..(411): unsure at all n locations
agtaatattttattttaacaatnccaatcattcaaacaaaaagcttaccttatattataaccaaattaatcatatataataactaggtcacaaaaactacgcaagtggtaacaactcaatcaacttagaacatgtttgacaatcaagtggaaaacaacttttgagacaaaaatatttttgcaaaagaataaatgcatgtttggacccaagttagaaatgatgtacacatgttacaatgcacattcaatagataaaaacaaaaacaacaatcttgatcttttagtaaaaatactctttctttaaaagtattttttcacctcattgtcaaacatgtacttagaatctcttgtttttctttcattttggttttacctatttcgatatatactagagcacacttgttgtaacaat

SEQ ID NO: 300037 - DNA, 418 bp, Glycine max
  unsure (1)..(418): unsure at all n locations
agcaatgttggtttccctctctcaaggtatgagaccaagtatacacacctccattcagaccaaactcttaaatatcatgcaccaagctggaacaagggcaaaaggctaggcaatccttggctaacaagtcaatagcagattgagaatcagattttactataagaaacttaaagccacgactccaagaaatctttactccaatgaggatcgcccataatttagcattgattacagaacaattcccaatattaactgagaatgagaaaattacatttcccatatgattgtgaagtaagccaccaacaaaaactataaaaatcacttttggatccatcacaattaagcttaaaatggtcacaatgcggttgctcccnaaaaatattgntctaattattatcctgatcactaccattccctc

SEQ ID NO: 300038 - DNA, 423 bp, Glycine max
  unsure (1)..(423): unsure at all n locations
agtattgctatattctgattattatgcctttttttatggttggcnttggctatattaattttatgaaaacagtctaagcaatgctggtgttttattggtttggaactaaacttaaacatggttgtgctacagattaagttggacaaggaaaagaaaagtctctcaattcgagagagagggatcggtatgaccaaggaggatttggataagaatctggggacgatagcaaaatttggaacttctggtatgtatgttgcggacattatcgctgaagtaatttttgtttgtgatgtgactgggaatatgttaattggagatgtgtgttatttcaacatttgttgagaagatgccaacaagtggagatctcaatctgattgcgcagtttggagtcagcttctactctgttatcttgtggccgactat

SEQ ID NO: 300039 - DNA, 374 bp, Glycine max
acccgggatctctaagcacctgcagctgcagcttttgttgtctattttttagagagaaaaggccaagtccagagagtttgagagatttgctatggaagacctgagagaaccgagcttgaagaggaagctgcctgagaacttagatgagttgtgaggattggaagttctaagtggacagacatcccaccactttattcttcatccttctctcttatctctttttgaaaggaagcttccagtatgggaggtaatctctgtggtcttcttgaagacttgagacatactgatatctattaatgtgtttgtggtcctatgcttaacctcttctcctgctttcttgatccgtgatgctggttttgagagcattgcttggg

SEQ ID NO: 300040 - DNA, 411 bp, Glycine max
tttgctcgcctttttttcacaactcccttgagaagccagagcttagctacccacacacctcttattactaatgtcacctccttgacaagctctcttgagaacatccctgaagaatctagagcttacctacacccacctctctaatagctaagctcacctccctgagatgagaagctaaagcttagctactcaccccctatactagataagctcaccctcattccacaaatacatgacaataccacataaaagtccctactactcagactactcataatgccctgaaatacacggctaacatcctatactactagaatggccaaaataccatgcccaatagaaggagcaacctattctaacatatacaaaaaaagagtggaccaaccttgacccatgtcgtctaatatctac

SEQ ID NO: 300041 - DNA, 416 bp, Glycine max
cctctacttcattcaaaaatggccaaactcttgaacaagaagtatgtgtgccattgaaaaccagacagaaaatgtaagaatgaaagataggggacgaatctccacaagacaaagtaagcggtagacggaggcagaccaccgtgaatcataaaagaaaaaaatgacagaacaacatataggaatcgtgaaaaaccaacagtcgaaaatatgctcaatcggaaccttgaaaacgacacagggagatgcctgggaacaaatcaaggttttcaacaaagaatctcacgacggaggggatgtgggaggctgaaatcagaggcacgtgattgagcaaaatagtccaactataattattagagtaaaaccagagcaatgcataaggatctatgcaactctcttacaatcatatatacatgaat

SEQ ID NO: 300042 - DNA, 418 bp, Glycine max
  unsure (1)..(418): unsure at all n locations
ggtttgcaagcttttactttctataacaaataaatttaaatctaattatttatcaaatatattattatcacaaaataatttcaattactttatgaataatatcgtaattaaattagttttattttttttatagtaaagattacaaatattattcccgagcgataatcctactcgagattattttgtgtganaaaaatcaattagaaacaataatatcatgaattaaacaatcttagttttcatagaaccaaaaattatcatttacgaagacaatcatactcaaaattattgtggatagcaaagttctattctattataaaataattctaaattacttattcaataatatcatagagtacattagttgtaattcttttatgatgtagaccataaatatccttcgcgggaggcaccaact

SEQ ID NO: 300043 - DNA, 486 bp, Glycine max
  unsure (1)..(486): unsure at all n locations
agcgcgggtttgtgatcacctgnannnacccacanttagantanttaacctccgtgatgntgtgcgtactgataggtaccatgatgttttttctgtggtttgacacaaaccggtggagaagacactgcaatggcactcctctcctttcttattgaccctgtagaccataatcttttcgcgttcacgtttgtggaggacacgtaattcaactctgcctttttctaatccaaccctgcatttttccccggccaacaccccattcccatagactgaaggcatgcaacccactagctgttcatatgacaacactggccaagtgtctaccatatggagatcattctctctcaacatgggaggagctacttgtgccccaactcctccattgctgagcatattatcaaggctcacgccttttcctaaaatattctgactcgatacggcaggaccacatcctaatgaccgatactgcctatgacgccgatatct

SEQ ID NO: 300044 - DNA, 405 bp, Glycine max
  unsure (1)..(405): unsure at all n locations
agcttattgagggtctccgtcagggcttctatttgttgggacaacaacttcttttgagccaagattgcatcttgagtggtgagttctagaaggcttctctttgttggtgcatatgtgtgatcacgaagaatggcatgatcactagctaccatgntttctatgagttccattgcctcctccggtgtctttagcttgatattccctcctgcggatgcatctagtaattgctttgattgtggtcgcatgccatctatgaagatgtttagttgcaccggttcactctacccatgtgtaggtgttctccttagcagtccgtggaaacggtcgagcgcctcgctaagggattcatcgagaaattgatggaaggaagagatttccttcttgccttcacagtctttgattctg

SEQ ID NO: 300045 - DNA, 398 bp, Glycine max
  unsure (1)..(398): unsure at all n locations
tcttaacacaacattcacatgaaagtaactttnttgtcttaacacacaacttgatacgtgaatggcaacaaacttgagcaatccttgagctttcaagatcatgacaaacgaaagacaaattgaagctgtcttctgaatccagaagccctacaatcaataagacaaggagtgagtttcacatttgaaatcactaaactatgtcaaacgaagatttgattatgtcaaacgaaaatttggtattcaagtttcatactcctttctctactgtctctgatagtataatacacatttattatcaatctatggacaccattctgtcttagcgttgtcagatatcagcttttgcgctttatttaataaacatgccacatatgtgatgtgaactaaaatatgtcaca

SEQ ID NO: 300046 - DNA, 400 bp, Glycine max
  unsure (1)..(400): unsure at all n locations
agctttttatctaaggctcatcttggtggtgaaactccttcttccatggcttattccctagtggatggcgcctcctctcacctcttctcctttgtcttccgctgcatctccatggtggaaaatcaccattaaaggacctcattaaagctcaaagatccagcctccatagaagccccacaagtttttgtcaagagggagaagggaagaaacaaaagaattctcaggcggttagtcatttgaatcttttggcaagagaaagaagtgaatgaagaagaagagtagcacaagtttttgaacaacgaacttttcttggaagagaaagtattgaacaaaanatctatganagaaatctgttgatcatnaaaacaaatcaatcttttagaatganaggaatcagtct

SEQ ID NO: 300047 - DNA, 407 bp, Glycine max
tgtagggttaaagtttcacgattgtcatgtgctcatgcatttattgttaaccgtggctatacgagacatcttgccaaacaaagtcaggttcacgataactcgcccgtgctttttcttccatgctatatgtagcaaagtgattgatccagtaatgtttgatgagttggaaaatgaggccgcaattatactgtgccagttggagatgtattttccccctgctttctttgacatcatgattcacttgattgtgcatctggtcagagaaatcaaatgttgtggtcctatttatctatggtggatgtacccggttgagcgatacatgaagatcttaaaagggtatacaaagaatctatatcgtccggaagcatctattgttgagaggtacattgcagaaaaaccattgaatt

SEQ ID NO: 300048 - DNA, 383 bp, Glycine max
  unsure (1)..(383): unsure at all n locations
tcaagcttttacaaattcttctttctagggaattatacatgtttggctgacatagttaacaaacattggccatggtgaacatgcaatttcaaacttcttaagacaatcatcgaactgatccttggaaggacaataaaccaaactcccccaggcatccataacataatcttatgcattttgtgaccaaccanggatttacatccttgacattcttgttaatgtgaaacctacacaacaagtgggtacactcanganatatagttttcactgcattcattaatgctagaattttatcggtagcaataactccaaagagggcatcatgtctaagaaaaagacttcgaaaccgttctatagcccacaccacattatttagacgttct

SEQ ID NO: 300049 - DNA, 436 bp, Glycine max
  unsure (1)..(436): unsure at all n locations
tcatgcagctggaacatggaaaaaagatagtatattctatttattgaagatttctcanaccttatcacccatatcggcaattagaaaagcttttaatggaagctaggagaatgaaagtacactgaaacccttatgctgaaacaaaaattatgattgggtgaaagatatcgtaagtatctttgggaagaccccaaagaaggaatcatttgagaagaacatatggaagaaaaggtcaatattctttgatcttccatactggtctgatttagatgtacggcaatgtaaagacataatgcatgtcaatattctttgaagtcatgatttccatactcgattagaggctgtcgtcccatgtgacaggcgcgtgggatgctaataccttncttgtgcgtaaaaaattccgaaccctcattttcaagatatgcagaccttcgtc

SEQ ID NO: 300050 - DNA, 400 bp, Glycine max
  unsure (1)..(400): unsure at all n locations
tcaagctttgtcatgatcccaacgcgtttgtccaatgtttggctccatagcgaaacttccttgtactgctgcacttgttttctatgatacgctatctgctcgttcaagtattccatgttttgtttggggttgctgttgtaattagtggctcccaccgtcttcaatcttagtctcttcttatcagaagcctcgagttccgccatgtattccatggcaaaataaagacttctggtaaaagaaacaaacttttccattttggagatgatctttggggtgtttcgagcaccgtaactaagctngcggaggtcgatgaggcctagcttgaggtcggcgtacacgatgtccaagcggctgaagctggggtcggagcatttccggccgaaccgtgagacagtgtctg

SEQ ID NO: 300051 - DNA, 418 bp, Glycine max
  unsure (1)..(418): unsure at all n locations
tttacgaaccanacccttatccaacaactcctttacttgtgtaataacctcaagccaaagaggtgtgacaatgctaacaagtgtctttttacaaaggagaaaatgtggaagttttctaagaggggaagtttctttaatgtttgtctttattataaaatgactttcgttcttagctaacctcttggaggagacacttacctccttatactcctccttaaccattaatggttgtcattcttcttgggggtagatttattcactagattcttccctttttgcttcttcacttgcactagaggaagatgaagaagtagtctcatcttggctactataaatgtcttggctcctcataatcatggctttcttggtggggcattgaaagtaatgtgtcctttccaagacatttanagcactttat

SEQ ID NO: 300052 - DNA, 427 bp, Glycine max
  unsure (1)..(427): unsure at all n locations
agcttgtttcgaataactatgtagaagttatctctgaattaccagggataatctcaattcaaaatgatcatttttttacaagttggttaacggtcttggttacacttctaagttacttcggatgtgtttgatttagaagaagaaaatagaagataattgtaaaattcaagtagagcgtaaaagacatgaattccgtgtgaagaatacacaattttcttttatttcttcattcccaccctaatccaaacatcacctcttggccttgcactttaaagcgtcatatcaaatttaaagtgtcgtgatcaaagcatgaacacacgatgttttgaggggttatgtgactgtttactaactttcaatgtgattactacttaaaataagaaatgttctcttcaaacatgtgggtggatngtatctattgatagat

SEQ ID NO: 300053 - DNA, 448 bp, Glycine max
tgctgaatatgatgctttgttgctggaccgtatccttgactttctttcatatttgcatggcgatgatattagaaaaacggttagtttcatgccttcaccacaccactcttttctttgattattgtagatatgtttaggtttgcggggttatgaaaaagatcatttttttttttgcttactagtgatggatttctgatgcccccacttggaatattatggaatggtaaaatgtaaagatggtagctttggctaactttgatggattcctgaaacccctcttttggtatttgtacatggtaacgttgttggtattggaacattgtcattcggtggaaagagggtccaaaattgtctggggtatgtatgcactctggaatgcgtgttttgaattatttttctatgggcttatgggtcctgaattgttggtctgcgttacttatcatttgat

SEQ ID NO: 300054 - DNA, 380 bp, Glycine max
  unsure (1)..(380): unsure at all n locations
gtcacaatcggcagagtattgagcggcaccaccaactcgaccacctatgaagatgattaaataaaaaagaattggatatattgggaattattaagaaaggaagagagagaaaagactgactagaattgcgatgatgtttgaaaccaatagagaagtgaagccaagtcttagtgattttgtgccaacaatccattgagaggagagttatgtgaaggaagggattatggatatatataattggcaccgaaacctggaacacgttggntgatggatgtgccaagcgtctcgtggtggtggcaatacttactagtactatatatgatagatcgatagaatggtggcttggatatctgagtttacacttgtctccttttcgtatc

SEQ ID NO: 300055 - DNA, 406 bp, Glycine max
  unsure (1)..(406): unsure at all n locations
tatgcttgtgttggtgattaattttgtctgattaccttgnttgnttggatttctctcttctctctttcattgcgatattgatttcttctttgctctttctccattaattgcttatatatggcattcatattgtgttgcaaattttcgccagactccatgaaatctggggggaatgaatgcatataggaggtcaaactactgaatttttgctcctctccgctacnggtcatacgttggaattgtccataataaaaaaattgatccaagacaataatatgttacgataatngtatgtgacaatatggtgtgcgtgtgtttggggcgaatctgcaatgtgaggaataagtgcaccctgtctttaacatataggcagggttggactacctaagtgtgttgctggagatgt

SEQ ID NO: 300056 - DNA, 568 bp, Glycine max
  unsure (1)..(568): unsure at all n locations
gagatgagctacacgtactcgaacttactctcattccacttnaatttcttatattaannnnnnaagcggcgggttgatgcctgctancacngacacacacaanactcaagctggccgctctntctctctttggtgaggcacacggcaaatttttactggtgtattgtaataacaactcaatgggcgcattaccagggtgatgcaaagtataaaatctgaatgtaaaatcattcgaaaaacatgggaagaggccttgcattcttgcgcctatgaaacaaaggaaaggatcactctacttgctttggcggaaaatcccactttggtatcaagcctaaactctttgaaggctaactcaaagaggaagctctcagtatctgttgagtctaatccagagagatcaaaatgggtttatatatattccaagagagaatatgctaccattaaccccanccctggtgatgtaattcttaaccctgtgtaacgcattaaactaatatgaatacttcaatgtaatcattccctttacctcaatgcggatgctaagagtaattcatgtaacatcgaaatt

SEQ ID NO: 300057 - DNA, 381 bp, Glycine max
  unsure (1)..(381): unsure at all n locations
agctttttttgttcgatttttgcctaaaaatntacaatgcagttcggctaaggttcttcgtgcgaactgaaccgaagttgtgtttcgggcgactggcatgttctcattttgtcggccaagaaaacattagcccaccttggcataaaaaacatgattcaccgatattgacaggaaaagaaaaatgctagccgacgtcggccaggaaagatgaccgaccgatgtctgaanaagaagcatgaccggatgactccggtcgaacatttcctaacagatatcatccaagtattattcagggattgaatagaacaaacaatagccgacatcggtagctaaatagccgtgactgatatttttcggccgacattgcgcaatntcttttac

SEQ ID NO: 300058 - DNA, 566 bp, Glycine max
  unsure (1)..(566): unsure at all n locations
tcgctcatcctcttccatcgactctaagtagcacacaatttggacgatatttcnnttnannnnnncgcgggcggnttgatgcctccntggacannccacatanaananacaagctncacctgcggccatatcgacgcgccttaaccaacacactctttttatatttgatggctacggactcgaactcctcttcgactaacccggctctttcaagctctggctttaaggcttggacctcatcactctcttccgaagctctaaccacaccgtatctcacagcctctagatctgggagccaatccaatccttgtgtgtcgactctcatccacctatgaaagccgccgacgatcccaacacctgcttcccctaagcctcttgtcctttcttcacgccgcatcccatgccttgccaactccttggagcaccctcccgtttgggtcactgaaaccacatgcaagaaatggacgatgcctccgtctgatggcacttccctcatggcgtagccaagctgcctattgcgaggaccgcattatattaacacaacccccagtgcccatcacgagacg

SEQ ID NO: 300059 - DNA, 390 bp, Glycine max
  unsure (1)..(390): unsure at all n locations
agctttatttgccctctttctcagtggggatttcttcttcggcgaaggcaagatagttgttggcagtgatattattgaccagccctccgaaaccttctaccgagatgtcttgggccacatgggcctcgttcaaaaccttcactagcagagcccgatgaggctcagagctcatgagtaactccaacaacgagaccctggccggagttttgttgagctgttcgataaccttgaattcgctctactgaattatacggaggaactcactgggcttctctagtgacacctnnctttttaccatcctttntctccgggaggccttntgccggaatatctttattcgaagcgtggggtgcttcgccatcttgttccttcaccactattccttttccc

SEQ ID NO: 300060 - DNA, 287 bp, Glycine max
  unsure (1)..(287): unsure at all n locations
tactaagctgaaatgacatcgaagctctcgacaattccaaggtataatantgcacacggaaggtcgattctagcgcatcacatatcgagacgctctaaattgaaaacccgaagctctcgagaaactcaacaagtcataaactagtcacacggaagtccgattccggcgcataatatatcgagacgctcgaaattgaaccacacatgctctcgaagaattccaatgatcataacttttctcacagaaatccgattctggcgcatcatatatcgagatggtctgaattg

SEQ ID NO: 300061 - DNA, 373 bp, Glycine max
  unsure (1)..(373): unsure at all n locations
agcttatataaccaccgtgctccacccagctcatcgagtaactcatccaccgtgggtatggggaagcgatcgcgcaccgtgatggcattgagagccctatagtctacacaaaatctccatgatccatctttctttcttaccagcaagactggggatgaaaatggactcgagctaggttgtataaaacctttcgcgagcatagtagctacctgttcttcgatctccttcttctgaaagtaaggatatctatatggtctaaccgttcaccgggttgagttaggcaatagattgatggtatgatctgtggatcgtgatggtggcanggtcgtgggaggttggaagagggaagcgtatntggtgatcaatgtattga

SEQ ID NO: 300062 - DNA, 357 bp, Glycine max
atgagaaacttacaaaatcattgcttaaaatcataagaggaattacacgattatgttacattagaaatgaaaaactcataagaagataagattaataaaaaaaatgcacccttgatttggatttatgatgaaatgacattgttttatagataaatattaattggtagcattattagcttttgctagcgaagaaagtaaacccataatctcttctctgtccattctccatggatcatgggacaactttatatctcattctttctgatagtacataaacccttgatgtgtgattattataagcacgatatataaggtgcagggaaattactactcatttggtcttgatactgacatgat

SEQ ID NO: 300063 - DNA, 399 bp, Glycine max
  unsure (1)..(399): unsure at all n locations
agctttatataagctgaaccattgtatcaataaacacaagttgagttttattcagaaaattagagtttatctattttatcttagtgagagtgatcctcctaagttcttgagtgattcgagaacaccctgactatatcaaaggactttcacaatctttgtgtgttgccctcaccggaaagagtgattctttcctttctttcatcttcaaccttgttctttcaaaccataattccagaaaatccacttttgcctagaattaactcgtggccataactcccatttacacgctcaaattaagtgattcttgagcctaaattgaatntcaaaatgagatctttcagctcgttntggaatcacctcatttggagccctggagcttgagttattggcatttctata

SEQ ID NO: 300064 - DNA, 413 bp, Glycine max
  unsure (1)..(413): unsure at all n locations
tgccagaataatgggttggatacagattattctgctattgttggttatcttgagaagccttttgagtctcactagattctactctgcaggctttttcgtccacaatgaaggcatatgccaacacttctacaatgtgagggatgtttctgatggttttgatgtcaaatcactctctgatagagttggagaagtgatagacaagttggaaactttgcaggccaagcttgactcaaaagtgcaagaaatggataaaaacaaaggcacctagttggacaagaagtttttaaaggatcaaatagttatgccatcttataatgctaatgttgctctaatgcgggatagggttcccgaaggtgatgaagggatgaagtccgcagtgaaaaacgatcatgtgatcaattntttcatcactg

SEQ ID NO: 300065 - DNA, 415 bp, Glycine max
  unsure (1)..(415): unsure at all n locations
agctttatcttcaacacaaganagaagtaataaggaggattcgattgaaatagacgaagatgatgatcttagtctatttgtaaaaagattcaacaaatttctaagagtcagaggaaatcaaagaaaagggcagaagattcatcctctactccaaaatgttatgaatgcaatcaacctagacatctaaggattgattgcccaattttcaagaaaagaatagagaaatttgaaaaaaaagtttttaatgaaaagaaggctaagaaggcctacattacatgggatgacaatgatatggactcatctgaagattcagaanacgaagttgtaaatctgagtctgatggccaacaattatgaaaacgatgaagaggtaacatcttctgataacaacttatccattcgcatttgatgaatac

SEQ ID NO: 300066 - DNA, 451 bp, Glycine max
ctgataccactggtggagtatcttctgtatatggatatatactttgtaaagaaaaaaaaatatagtgtatgaaagaatagtgtcaatattttattcatggactctatatatatagataaaaaaaatgtaacaaaatttaaatattatcaaattattaatctcctaaatctaaaagatacgtcaaatctttatctttatctaaacaaattcataatattcttatattaaataatatcctcaacgcttgaaataaataataaattattaaaaaataaataaattactcctttgtaaagatatcatacatatttcaataactttaaacaagaatttggattacgatcttgtagataaaaaaatgattaaaaaggaagactctacacaagataattaatcaagttgtttgaaattaattatcaacaatgtccgtggatactccgtcacaataaca

SEQ ID NO: 300067 - DNA, 402 bp, Glycine max
  unsure (1)..(402): unsure at all n locations
agctattaagcgtttctggacaagagggggcactctcagaaacgttcctgttggtggtggctgcagaacaaacaagcgtatgaagcgtccaacacacggtgattcttcttctgctaactctccttcttcgtccactcctagcgccagttcaaaccctccttcgcaaccccacatcgataatattattgtttctggctccgccacaaaccatataaataatatcaaccctttgctttatggtggcgatgtgatgaataatgttcctttctcaaagtttaatcttcttcagtctcagctgaatgctcttgggttacggttttcatcttgggttagagagaatgggttagcactacttcnataacaacttatttctgctataactctatctttggttctcttctt

SEQ ID NO: 300068 - DNA, 369 bp, Glycine max
  unsure (1)..(369): unsure at all n locations
agctttttgtaatctattacacttatttggtaatcgactagtgtttgtttctgaaaaatctaaagatgtaactcttcaaaaaggttttgactttttcaaataggttttatgtttttctaaaaagttataactcttctgaatggccttcttgaccagacatgaagagtctataaaagcaaggctctgttttgtattcttaatcaatctttctaacaacaatcttgaatacttttgcttttccaatcaatcctttacaagccttgaaatctctttgaagttcttcttcttcttcttttgtaccacaagctttctgaagttntctggttctctaaaccttganaacttgtgctattcatcttntcattctct

SEQ ID NO: 300069 - DNA, 449 bp, Glycine max
  unsure (1)..(449): unsure at all n locations
gatactgtganatagaaactaacctctacacttataatatcttctccaaattgngcactagattntgaaataatgtgtgatgcaagtgattatgcagtaagagcagttctgggtcaaaggaaaaataaaatgtttcatgtcatacactaacaagcaagggtttaaatgaagctcaaataaattatgccacaactgagaaaaaattgcttgcaatagtatatgctttggaaaaatttaaatcttatttgataggatctaaaattgtggttgttactaatcatgctactataagatatttgttagttaaagctgattctaaaccctgacttatccaatggattctattgttgcaagagtttgacttaaagatcaaggatgaaaatggaagtgaacattatgtggcagatcatctgtccagactgaccattgatgaggtgaccacacaataa

SEQ ID NO: 300070 - DNA, 401 bp, Glycine max
  unsure (1)..(401): unsure at all n locations
tctagcttgtatagcaacattatagttgctaaattatatggattgttgcacctacaaagttatggggttgaactaatgtttcctataaattttgacaacagctgacctcaatctcactaagcttggtgggtggaaactttaacttatatggtggaggccaacagtgcagaatgttaggaacataagctgctattcaaaggttactacttagtggttagaggtactcctatttctaaggagcataccttgccgccaaattaagctagatatgaaaggctggatgttctgccacttaagactagtatttgtgactctattatgttctcactacatgactgacttactatacatttaaacaatngaaatntcttctagtatagctctttaaggtgttctacata

SEQ ID NO: 300071 - DNA, 357 bp, Glycine max
tagacatgatcggtacatgattcgtgacttgtatgaaacaattcgggaaacattggatgatggaaacagaggttgtcaaatttgcactctatgcagaactttgttgatgaatatgcgcatgcagaagatttgcatgaaggccagacaaatgctatgtattttctgatagtggaagagtcgacaaaatgaggtctggatgctggctcgccaatcccaatggtgaacatataaacttatgtacttaaaacttacagtgagattttcaaggcgatccatcggttcacgaattggaacgatagaaatggtactgtggtcttcaagagagaacaagctcgcactttggatcgagctttgggc

SEQ ID NO: 300072 - DNA, 403 bp, Glycine max
  unsure (1)..(403): unsure at all n locations
agctttcagtaaataaacttttatttagtagcttataatgttttttaaaaaactacttgaactaacgtcttttaaaataataatttctagttntatatatttttttatttttatccttaatatatttatcaagttttttacttattcttttaaaataaatcataatttttttttagttattttatatttttcacctgataaaaaaaagtcaaaaactaattaaaatatcatgtcaaactttatcttaataagttaattnttcagctttcaactataatcttcttttaacttttgactaattnttcagttatttttgttaaatataatcttgctccattgatcctataaatataccgtatcattaatcagtaattaatatgtcatcgtcttgcacatggactac

SEQ ID NO: 300073 - DNA, 438 bp, Glycine max
  unsure (1)..(438): unsure at all n locations
taaaaagaatcatgtaatagtagntntgtgatctctgatttaactaataacttgtgaatagcatattcactcttatctgattttttgntattatctattttaccctatttttcaaggtttttggcactaagaaggccctatggttgtttccattgttttcaaaagaggatttaaacaacatacctgcactaaggggcattgagttccctacacgttcggatgttgatgtatgaaagctgggtagcttataggtttgaacattnttttcattaaatgatgtcatttatgcttacttcatgacagtgcagcgtanggcatgaaagtaatactctacttgattgctgatgttttaaattatagaatngtccagtagatgtatatatgtaatgttcgattcagaatgtttgattattcttataatctaagaacctgtgatct

SEQ ID NO: 300074 - DNA, 406 bp, Glycine max
agcttctgttgttcaatttcgagcgtctcgatatattatatccccgaatcggtcttctgtgtgaaaagtttgaaccattcgaatttctggacagcttccgttgttcaatttcgagcgtctcgatatattatgtcccaaaatcggacatttgtgtgaaaaggtatgaccattcaaatttcttgagagcttccattgttcaatttcgagcgtctagatgagttatgtccgcgaatcggacatcctatgaaaaggtatgaccattcgaatttctccagagctttctttggtcaatttccagcgtctagatgaattatgtccgcgaatcggacattctatgaaaagttatgaccacttgaatatctcgaatgctttccgctgtcaatttcgagcgcctctatattttatg

SEQ ID NO: 300075 - DNA, 455 bp, Glycine max
  unsure (1)..(455): unsure at all n locations
ntggagtttccaagtgccaattcgtcttcttctttagtccagtcttcttctggcttcaattcttcagtgggctttccttctgtgtccagcatcttgggatgttcccagcctttgatgacagctttccaggttctgctatccagtgatttgaggaaggccaccattcttgctttccaatattcatagttgcttccatcgagaattggtggtctgttcactggtccgccttctttctccatgttcatcagaatttatctccctagatctcactctgtgatttccagtgttggctctgataccaattgaaattctgataccaggggacagatgtcgtacaagatgtcacgacatcacgcttcagaacatgcagattatatgtgtccgtatgaacagattatacaagtaaataacacaagagaattgtgtacccaggtcggtgctacctcacctacatc

SEQ ID NO: 300076 - DNA, 403 bp, Glycine max
  unsure (1)..(403): unsure at all n locations
accttgaattaattcctttgatagcccctttgagcctattttcccctttctttggtttgaagctcattacaagccttaagtgaaaaaccatgatatcaccttacccttaaagaattttggagctttggaattggtttgggaataagctgggaataagtgtgggggggtatgtttcattggaagatatgatttttggccatgcttaatgttttattttggccttgcttgatgtacatatattgcctagttctttctttaatcttcaattntgtactgggtcaataaaaaaataaanataataaaaaaaattaaaaaaaaaggtaaaaataattcagttgctggcaaattctgcatttcgtactattaaaaaaaaagaagtagaagaaaagaagtgaagttgaat

SEQ ID NO: 300077 - DNA, 428 bp, Glycine max
  unsure (1)..(428): unsure at all n locations
tataatgaaatgataaacttcaactttatntctgtagaatatctttacaacaaaatgtttgtaaaccataagatatagaacataagtaagactcccactaaactaaggtaccatcaagaattacatccatatgagtagtgtgctcatgaaaaaaactttaagtgtcagacctttagtaagtgcatcagctagcatggaatgagtccctatatgttctatagaaatctgtattttttgagttctttatttaacaaccaaatactttatgacaacaaatttttacttggttgaatcctaaataagatcgctaagatgttgtcccaataaacactcgatgacttcttaatgttggcaacaacaactaagctagttacaataatntaaaagtcataaattctagtatgatgtctcatagcanaaatattaac

SEQ ID NO: 300078 - DNA, 394 bp, Glycine max
  unsure (1)..(394): unsure at all n locations
acgcttaacttaaacaacattataatcacaacatattcaaaaaaccaaaaccccacaataaaactctgggaatgtaagtatttagtcttgcttttatcaagttctaaggcaacagtatatttcccaatgcttaagtcacctaacagtacacacaaatgggggatcaaaccaagagcattccataattaagcattgaaagaagcattgaacacacaatacacaattaattagatattaaagataattacatcaacttttccttagaaatctccaactangatgnttagccagccatacacagaaacncgaacacaaatgagatagagagtatagaataattgctgcttacacaagaaaggggatccnnntctctcttcttgcacctcacaatcac

SEQ ID NO: 300079 - DNA, 361 bp, Glycine max
  unsure (1)..(361): unsure at all n locations
tactaagcttggacatcaactaacttcattccctatgcatattactatctctttatatctttgacccgaaatagngggaatggtgagattatgataagataatattgaacatatcatgtttttaagagtggctgatgtaatatcttgcatgttggagtataagtataaggtgaagtcccacatcgggttaaaatggacaagttgagcaccatataagtgaggagaagacccataaaccagagccttaaggttttgggttaaagtgtggtgtcaagttcacttatgtggttgctcatgattcattgatgtaaatctctccaatttttacccccgctcagttgcacaacaattggtattaaag

SEQ ID NO: 300080 - DNA, 391 bp, Glycine max
  unsure (1)..(391): unsure at all n locations
agctttgttctcagatctctcttgntggactagacttagactaaacaacattattgtaacaacatatttaaaaccaaaacttaatccgcagatccctcttgtaaaactaagtttcaattttgcttcattcaagttctaaggcaacaatacatttcccaatgctaaaatcacctaaccaagcacaaaaattggtgatcagaccaagagcatacagaatttaagcattgaaagaagcattgaacacaagaaacacaatcaattagatattaaaataattacatcattngttctttagaaatccccaactaggttgtttaacaagccattacagaanaacccctaataataatgagattacaaaacctangtatctcttgcaaagctgctcctc

SEQ ID NO: 300081 - DNA, 455 bp, Glycine max
  unsure (1)..(455): unsure at all n locations
tgtaaactaanatagatcttagatagaagtgtgatattgttattttctgaatggaaaccctcttaagaggagaaatctatctttatgcaatccaaacacagaaaccctttgttggtgaaagtccagcaagtggctagcaaaggttgtaactagtggtgttggtggtctaacaatggcaaggtgtgaagtctagtgggtttgttggtaggttgttgaaatccagtggttggctagtccatcaatgaaatctcatcttgaagggtgtgaggactggacttagcccaagtttggggttaacccgtataaaaatcattgtgtatcatcttccttttctatccctttgcattgtttttatactggaaaatgtttactattttttactctcactaaggatggtaactccctttgaaaaacacatttaaaactganaccatgtgtcaaagtcttttcaacta

SEQ ID NO: 300082 - DNA, 364 bp, Glycine max
  unsure (1)..(364): unsure at all n locations
agcttatctctagacactatataccagatgctgtaaataatgacaggagattccatgcaacctcctttgcaggagagcactgccatggctgcttaagcaaaaaaaagaaaaagaaaaaagataacacaattgaaaggttaagaagttaaaagaaacaaatgtacaaatcctactgccaattaaatggaaataaactaaagtgattatacccaatgggtgtaggcgtgtagctcagctgctaacacagacgctgagtttgtaggggaggacctangtttggtccccgcaaaatacacttcttgagagggcgataaccttaagtgtgactaagtcctagaccanaaattaatctcatagtcgactc

SEQ ID NO: 300083 - DNA, 465 bp, Glycine max
  unsure (1)..(465): unsure at all n locations
tactaagcttaggttttgatgtgtgagatgcangcaacgcggaagcaatanattttagtagtccagcttgacgagatgcttgtaactcaagatcctttccctccaaatactagaaaacaaaagttaataaataaaggaaaacaggcactttaaaaaattaactaaagcaatttaaaaatcaaaagactactatccataaattatgaaagggaaatgcatacatttacacttgtaataattcttaaaaaaaggaacttttggttaaacaactagttaagaaaaaggattggttggacgattgtccataaaagttagtgatttatatntctgataaaacaaaaacgaagaccatatgcaagcatcaaccagaaaaggacaaagaanagctcagcaataacttcgagtctcatacgaatacaacagcaggaatcactagttcttccagataaaatattattcacaaat

SEQ ID NO: 300084 - DNA, 415 bp, Glycine max
tgttgcaagcttatttcgacaatggtggcctcttgggaatgaagcggctattcctccttctgatgacgcatggacacttatctctgacccaactacaattcgttcgaaaggtcgaccaaaatcaacaaggataagaaatgagatggattgggtcaaaccatctgagcaccgacaaaaatgtagtagatgtggagccgaagggcataacaggcgtcgctgtccaatgcaatctgagtgtgggagttgttcaactcgctgatttatgtatgttagtcgagtgacttgtatttgcttacgttctgtttaatgtatcgaatctcttgggttcaatgaattcggtagctaaaaccattctggcttctgtacattacttatttctggggttcaatgacatcgttagttaacaacataaaca

SEQ ID NO: 300085 - DNA, 480 bp, Glycine max
cggccggtgtgctcctgaatacgcaacataatactagcattgcaagacattgctttgtaacgccattatttcttacactgcatatttgaatggggtgaccttggcaggaccgatcatgcgatagtcccataccttgccgactgcttatacagatacgatttccagtgatctgaagaacggccacaatctggtgctccaagttatttactactttacagtacttaatggatggcacgattgtaggctaggcctcatgatccatggatcattcgaaccacatctacctatcatacactcgagagacgctactgtgaggcactgctaccatacttaatattgctactcattagacagatggctgacacgatatcgcgacgtctcgctgcctaatataccctatatgcttggactgatcaaacgaccaaccaattagagcgagcacatatgtgttatctaataaagtgtacgtacctacactgg

SEQ ID NO: 300086 - DNA, 332 bp, Glycine max
agctttttcagagaaggaatctacggaggaaatgcttaccacctcgaaagactggaaagcggtttctaatgactcctctgcggcctccacataaggcatagaagatgggcagctcaccaagttgtcttcctcgcctgatacgatgaccagatgcccttccactacgaatttcaacttttggtggagtgtagagggaacaactcccactgagtggatccacggacgccccaacagacagctgtagggggggttaatgtccattatttggaaggtaacttggcatgtgtgagggcctatctatactgggaggtcgatctctcccctaacctctc

SEQ ID NO: 300087 - DNA, 450 bp, Glycine max
  unsure (1)..(450): unsure at all n locations
tgaaccttgaatcttaattcttgattcttgaaatcatatttcctcttgaaccttgaagtgttcttgattcaatcttgaacatcttgaactcattctttgattctttgagatcatcatctttgttatcatgaagtgttcttgacctttgagctttttgccatcatgtttgttatcatcaaaacttttttgaatcaatcttgattcatcatgaagcttgcttttacaatcttcagctgctggtaatcgattacaatcctcatgtaattgattacatgccttcaaaaatattcaaaattattttaaaaatgtttcaggaagtgttttggccactggtaatcgattaccagagagtaaacctcttgtaaaaacatttttgcttaaattcatcggccanacttcttggtgtttcaacttggaatatcctttctaaatcactagagatcttcttga

SEQ ID NO: 300088 - DNA, 368 bp, Glycine max
  unsure (1)..(368): unsure at all n locations
tttgcaagcttgttaaaaagctagaaggagntatgtcttttacatgcctaactcccttgagtgacatttgtattggttggtatcttgtgtgttgcatcttagtacatatcaaatttttatgcatccttcatcatcatagtaagtatgaagaanagtttctaagttagaaaggtttcttcaagaggcaaaactctctattttaatcgattacaaggttgtcataatcgattacaacaagttgtttgaagctgggagagttgagtctcgtatcggcttaatcgattacagtagactcataatcgagtacagctgtcgttgagataatgaatgatatattcaagagtatttgatttaatccgataccaagt

SEQ ID NO: 300089 - DNA, 387 bp, Glycine max
ctacggtgaacaagagacatatataaatgaatgaccaatgtatttaatgaaagttgaatagtaaggccatgattggataaacttctctccatgcgtacatatgggagaagaaattatgaagataaaatgaattgagtttctcctgtaagcctaagttaatttacatactttgacttttagagaatttaaatgagattgcttttatagaagtacagtgcatgagttgattctaactcataggagatgctcaatttaatttatcttcttattttcttcttctataagcgcttatgaagaaatttatccaaacaagaaaccttggcggctcaaaaaacatatttgatatgattgctgcaagataccttgaatcaaaatgcattggtaaat

SEQ ID NO: 300090 - DNA, 407 bp, Glycine max
  unsure (1)..(407): unsure at all n locations
agcttgtcgcccagctcgcccaggcgagctcagctcgcccaggcgagcagggttgcttcctccagaagcaaccgccttctggaggaatcttctggagggcccaaatgggcctgggtgctatttgcacccccatttttactaagtacacccccctctgctgttttttggtgattcttttttcgtaaagttacggaaacttacgaatttcgtaacgatacttgttttctttccgtaatgttacggaaccttgcggattacataatcatcccctttttgacttacggaatgttacggaacctcacttaattatgcaacgatgcttccatttgatttccggtgtgtcacggaaacttacggattgtgcatcaatattttttttggttnttcggcatgtcctggaatttcac

SEQ ID NO: 300091 - DNA, 445 bp, Glycine max
  unsure (1)..(445): unsure at all n locations
cttctttggaccttgaacaggcaactaactcctctttcagatccatgctatgtgcccgcgactggtctctttcttcccttcgcaacttgagttcactattgctaccccatagagctccgcgaaatttgttccggccatactcttccttgcgagccctcttggtttcttgttcaagggctcttgcggtaattgcattctcttcccgtaacccggcacactccttccgaacgtgtgtagcggccaacttgaacttctccttggcaagttttgcctttcctaactcgcttttgagagtttggacttcttcgtcctcttccggtgcttcaaaactctcttcgctgacgactnttaacttggcgagccaatctaaacctcgtatatgaaccttcagccattcgtggtacccaccaatgaggccattacgaatgcctctaagctcttgatc

SEQ ID NO: 300092 - DNA, 395 bp, Glycine max
  unsure (1)..(395): unsure at all n locations
tttctgcggcatgcagcttttaaagcttgcgttgtatttttatgttgtcaaagcttaattatcccataagctccagctattagtgtacgctaatgaatggtttaatatcttttagaattcatttaggatcctattttagtgggtccttatacagttagcaatagtacttgacttaattgccaatataaattggagtattaggtaggttagggacttaagtcattgtgttataccacatcttattaatcatatattattggttaccatctgtttttcacatcttctacctaatccctataacttccacatcatattnagtataattttcctcattcgttcttcccccttttaaagtcaaattcacatgtagtgacctaagatcatgtcaaaatctc

SEQ ID NO: 300093 - DNA, 301 bp, Glycine max
  unsure (1)..(301): unsure at all n locations
tttttttaaaaaaaataatggtaaggaatacataagttgattggttttaaaaatagtatattggggggaagttacatatataaaaaatggatattgcatgaaagaaactgaacatttgaaaaaaaaaaaagatgccccggggcatgggtctgcattatacttagagctatctactttaacaagagaatttattcaggaaaactggggtgatgggtgtgcattaagagaaggttcacaactttgtcattaattcaatcacacaggaacccctaactcgttgatcttcattatcnncgttgtc

SEQ ID NO: 300094 - DNA, 410 bp, Glycine max
  unsure (1)..(410): unsure at all n locations
tctagcttgttagacttgcaattctcacacctgtcaaggttatctctcgacactggacaatacttgtccatgcttaagggcttgactgactcgtcatcctcctacttgtcaaagttactacccccgacacgggacaatctcctttgacactagacaacctctttcgcttgccagccggctcagagctttggatgcttatgtattgtccaaggtccacaaaatacacatgtcatgctacgtgacactccaagacacacgtcaaccctctatgtcagtcttggcataagagcacagacgtctaacccgtagtagctggctccccaacagacaggttatctctaacctcttaattatttgaatatattgncatctccatatctcttggcacgtatacaaagctacacattatc

SEQ ID NO: 300095 - DNA, 396 bp, Glycine max
  unsure (1)..(396): unsure at all n locations
ttgacttgagtcatcaagagattataaatacgtgaccatgtcatgaatntcaacaattatcaatcatctttgaatcatctatctttcaatctttttcaacatcatctctcatgcatctttcaatatctttcaattcatttctctttatctttcaaaaagattttgttcaaacactgtcttttccaagaaaagttctttgttcaaaaacttgtgctattcatctttttcattctcttctccctttgccaaaagaacgaaggacaaaccgcttggattcttttgtgtctcccttcttcctttccaagagaattcaaaggaccctgcctgagaattcttttgattcttcccttacccttaagcaaaagatttagaaggactagccgcctaagatatctt

SEQ ID NO: 300096 - DNA, 335 bp, Glycine max
agctttgagccaaaatcctgactcaccataaaccttgacccagggtgagaatgtcaatccttaccctcggaagcaaaaaaagaatagaggggaaatttccaatcaaagaaaaagagaaggaaaatttccaatgaaagcaaaaaaggaaaagaaggaaaattccccaatcaaagagtgggagaaagcaaaaaaagaaaagaaggaaaattccccaatcaaagagtgggagaaagcaaaaagaaaagaaaggaaaattcccaatcaaagaatgggagaaagtaaaaaggaagaagaagaaggaaagaaagctcctgatcaaggatcgaaagaaaaca

SEQ ID NO: 300097 - DNA, 428 bp, Glycine max
  unsure (1)..(428): unsure at all n locations
tgtagaggttaggattaagtgcaaaaataatgacttatacttangaatccaagcctttggttttgagtgccagaaagcatgaaaatgagagcatgttggctaagattccctttttaggccaacacttggtttgggctatactgtgacatcctggaaatttctacccggaattttgtaagtgttacatttaaataattatatgtattattcagggtatatatatattcttggtagaagtatgtacattgggggaaaaatacgcgggttagactaattaacaaagagtaatccataactggacagttatagattaattcgcaattaattagtctaaaaattatcattttgcgtgcgacttaaaatttaacaaaaccaacctctggaccacgctcanggtttcattctgagccgtttgatatatatacata

SEQ ID NO: 300098 - DNA, 387 bp, Glycine max
  unsure (1)..(387): unsure at all n locations
agcttgtatgtttgtacatgaccaaatctttagttaatcgtctttacctaaagcagtctttgtattcgtttaaaatgcatgaagatagatcagtaggagaacaattgggtttggttaataaaatgattctagatcttgaaaatatcgatgtcaccattgatgatgaggatcaagctttgctattgctatgctttttgcctaagagttactctcatttcaaagagactttactatttggaagagactctgtttctcttgatgaagtgcatgctgctctgaatttaaaggaattgaatgaaagaaaggaaaagaagtcctctataagtggtgaagggctgacaacaagaggcangaccttcaagaaagatagtaaatctgataagaaga

SEQ ID NO: 300099 - DNA, 450 bp, Glycine max
  unsure (1)..(450): unsure at all n locations
tccacaacatccaagcaaaacaacattcaaacagcacaagctatcacagtctagcaaaacagagcaaaggcagaaaactctgctcaacacatcaaccaaaatcacagcttttctcacttaaagaccacagtaacaattcctttgatccaattcgttaaccgttggatcgactccaaaattgtactggaagtctatagtgcataagcctacattgtgaccgttgggatctactagcaaacatccagaactcattctgtactactctttccacagccaaccacacacaagcattntctgcaccaagctaaaatcctgctgcacctattgtgacagcaaaattctgcataagtgcagatttcgaacatcacacttccnctcatccaatcttgctcanatcacatcctacaagtcccaaatcatgtatcanacatgtctaaaccaaagccaagc

SEQ ID NO: 300100 - DNA, 426 bp, Glycine max
  unsure (1)..(426): unsure at all n locations
agctttatgagttgaggtgtagagctttggttcccttaatttgatgacttcagcatttgtagtctccatagcatggtaaacacatgaagcacactatgctgagacaaattcaataatcctaagtactttattaaacatatgtattttgtttttttgatggtgaacttgatatttaacatagggtaagggtacctgtccccttgtgctttaagtaaaggaaaatgaccctttaagaaaagatggagttgaattaaaaccgtttgacaatcatccaaactgtccaaattcatagaactggcagaaattggttgtggatgtgcacatgttngtgtaggtgtgtttgtggtgataatatataactctaggcatgtgagcttcgagaattatccaaacatagaaaacatagtcattatgtccttatcatca

SEQ ID NO: 300101 - DNA, 455 bp, Glycine max
  unsure (1)..(455): unsure at all n locations
gaagctntagtgcaatgtagagggatcaagagcagcgttagatggaaagagcttgattataacttatgaggaagataggaagcttaattaaaaactatgtccttggcaagtaaggcttgtcttcttccaagctcatacatatattatttggtaaatagtcacttttgtctctaaatgtgtaattcgctgacaaatgcgttttttaaagataaaaatacaaaatttagttctcgaaagtgaaaaaagtgcaataaatatattcgactgttaacttgtctgttaccattaaaaaaataacctacgtgacatataggaacgaatntatcactgaaatggttgtcaacatggtcatctctaattaccaacataaggatatattngtcatataatattttcttgacttttcgtcttttcactctctangaatangaatacgataaatagtcacttttatt

SEQ ID NO: 300102 - DNA, 427 bp, Glycine max
  unsure (1)..(427): unsure at all n locations
agctttttcaatgtatgttatgcaaacttccctgtttcccaagtctctttaaaaagaggttgatagggcttgctgtcattttatttggggtcatgataattgttgatcctccatctcccattagacgacatgtgaagtggaaaatgatccgcacganaaaatctagtcaaatgacgtctaacgcaataaaggaaattgcatataggattgtaagtaactttcattcgtcagtggtcattntttataataattcttggatcagtaaaccaaatntgtttcatctattgactacagaattccctggaaaagcaaccctcatagggaatctttattgcccatgggcatcaagatgtattgcttgtttccattgggcaaccaaagcaccctagtcatgttcgtgattctagagcacggtgtacgatcaaac

SEQ ID NO: 300103 - DNA, 452 bp, Glycine max
  unsure (1)..(452): unsure at all n locations
tnccatagttctgaataaatcttctatagtagcttgaaatttctatatattctcttaattctttgactgtctcaggtcttggccactgttggattgccttaattttatcaagatctggatgcacccctttgacagaaatcaaatgtcccaagtaattgattttggttgttccaaagctgcattttttgtagttgaatgccaagttgcgttcttgtagtatttgtagtgtagtgtgcatgcattgaatgtgttctgaccatgtcttggtatagactaagatgtcatcaaagaaaaccaaaatgaacttcctaaggtgctccctgaaaatatcattcatcagattttgaaatgtggctggtgcattgctaagtctaaaaggtaacacaacccattcatagtgcccactatgggttctaaaggcacgtttatgaatgtcttcctctaccattctg

SEQ ID NO: 300104 - DNA, 412 bp, Glycine max
  unsure (1)..(412): unsure at all n locations
agcttgttggagataatttaaaatttaaggaganaaataggaaactaagattctaattagtgtggtacaaaataaaaaaagtgaaattatttgaaagattacaagtataagaaaatttgtggccaatgatcaaaggagggtgaaggcgggcgagtggcgagtgaactcagtgggttagaaaatagaattgggttttggattgggttgtcgnttcgtttatctactctcctcttgttcatttcatcgcctctcagccacctccccttcgctcctctctctctctctctctcgcgcgcactacaatcaaagtcatgaaagcattntgttcatagaagaangaaattcctcttcctattagaatacnggtnttttcccattcaattcaatcatgcttccggcactgtctcaattc

SEQ ID NO: 300105 - DNA, 409 bp, Glycine max
  unsure (1)..(409): unsure at all n locations
tatgaaaatttctttataaggatgaagctggctgctgttgttttctacatagtacatagttaagtcatgacacaaagaagtagtttggtcttgtttaatctccctttatttcatcaccaagagaataatgtcactccctttaccgttgaacagaagttgtgattgaataataggctaccatggcgctaattgtgtaaattttaaaattttcttcttaatacaaagtcacgtgattggtcagaattatcaatatatttttttccctcaagtttaagagttactaatctagatcaaccttacaattagatgcccttccttatctttgtaagtatccacaaattctctgatcaatattcaantagttggtagctggatattaaattctctcgataagtctcatgttctattt

SEQ ID NO: 300106 - DNA, 357 bp, Glycine max
  unsure (1)..(357): unsure at all n locations
agcttttctctgaanacttactaaaataagctacaaaaacagcttttttttataagtttctctgtgaagcgtattgaaataacttacaaagagtttataggaaggtcataagactaaataagctcttccaaacaacccctaagtctcccaaagcttaagctgctagatgacagctcatgaatgattttatatctagcagacctaattagaaatttcttagactttgaacacaactacaaacttcaatatatagagactgaatagaaaatttcaagacagtcaagggacctgtagataaattaaatcaaaatataaagacaaggttataaaattaaccaattgggctagaatcatctt

SEQ ID NO: 300107 - DNA, 438 bp, Glycine max
  unsure (1)..(438): unsure at all n locations
ctaagctttgctaagaatattgcatttgaaaacgctcatgcattctgcatgtacatgcatatttgtcatcttgtgacagggacaagattgttttaagcaatggtcaaataccgcgccaaatccaagacagagatgggtcgaggtaagtggtaacgtgaccaagatttgctgcgcaatgtcattttctgctttcaagtacttgnggacggngacgaatggatgctaggcccatgatcaacagatcgctatcctacgtccaactccggacaatcgagaagcgctacagggaggcagcctagtatcctttaaattcctacatattattattgttgtttctttaagatgataatcggatgcctaacttacccagggggtttgagtaagcgaacaccaacctatagaaagcgcgtactttcttttgcaaaaaaaacgagggga

SEQ ID NO: 300108 - DNA, 414 bp, Glycine max
  unsure (1)..(414): unsure at all n locations
agcttatataataattttttaacttgaaataaccctaagccataaaagcgctagagcctttatttttaatttttattatatcttatcatagtttatataaaattttgattaatcgattaaatttaaaggctaagaaaagaggtaagattaattttttaagaaaaaaaatggattttgggtacattntactattttaattagtatattttaaataaaagaggctttaaaatgatttaatcattatgatataaaaatgaagacatagactatgtttggtttagttagttcttaactttttttactagctganaaaatttagttgattatttgataaatgaagtctcaatgttatactcaaattagttagaatgggtgatgtaggtttagaattttcaattcgtaagaaattgtaac

SEQ ID NO: 300109 - DNA, 351 bp, Glycine max
  unsure (1)..(351): unsure at all n locations
gccctctcttcccttcgcagcttgagttcactattgctaccccatagaagctcgcgaaatttattccggccctactcttccttgcgaaccctcttggtctcttgttcaagggctctcgcggtaattgcatttctctccccgaacccggcacactccttncgaatgtgtgtagcggccaacttgaacttctccttggcaagtttcgcctttcctaactcgcttttgagagcttggacttcttcgtgctcttccggtgcttcaaaactctcttcgctgacgacttttaacttggcgagccaatctaaaccctcgatatgaactttcagccattcgtggtacccaccaatgatg

SEQ ID NO: 300110 - DNA, 404 bp, Glycine max
  unsure (1)..(404): unsure at all n locations
agcttgtctaacactatntgnttctcgtgaagggacaacaaatggcaaaggagttagagctttaatagtaagaatatttgcttattagtctggagatggatcatggtacactaacatgcttttatttagtacctttctgcacataaaaagtgcccaattttgtatgctttgtcctggagtgacgaacaagattgtgcgagagactgtactaaggttgtcacagtagatctttggagtctgaaaaaactcagaagagattgaatccataggatttcagcttcagtactcagcctcagtgctggactgggccactaaattctgtttcctgggccaccacaaaattaaattggngtcaagatatatacaagcacctaaagtggacatcttatcattcatctatatat

SEQ ID NO: 300111 - DNA, 453 bp, Glycine max
  unsure (1)..(453): unsure at all n locations
tgtctcctatgcagtgacactatcctcagaatataaaatttgttgtgacagatccaaatgcaaaggaacttgcgaaccccaccactccaaacacaatctccacaccattgctgaaaactcatactacaagaaaatatgatttgtagattctccacaccattgctgaaaactcacactacatagagtttccgaggctggaataacattcctacgagccaaattctatttagagggaatgtgatcctaaagcgctttccatgcaaagccttgaatctttaaagcatcttctccacctccaatccctccccacaccacccttcctccaaagacacatctncttcaccgaaacttgcttatctatagccacatcaaataatcgaggataactcaataccaatgtcgcctcacccacccaatgatccctncagaataatactactttacctaattcat

SEQ ID NO: 300112 - DNA, 402 bp, Glycine max
  unsure (1)..(402): unsure at all n locations
agcttttgttatggatcactgtatgggttccttgaacctcagtctatacacaacgtaaagaacaaacgtgaagaatgtcaacattacattcaaacatgggtcacagaatcacaacgagaagtgtacttgggagcttacctgaatcaataagttgaattgatgttgtacaatatggatattatgtgcattattggtgcctaactaatgtttntcgtcttcagggcacattggcaacttgttgttctgtgtccacgggacaatattgttgtttggttttgttctttgcataagaagcttgatgttaacatcaagactgcagtgaacaagttagttttaacattataaagtcaatattgtatagaaatcgtagcgtataaacacaatgattatttgatatatatg

SEQ ID NO: 300113 - DNA, 368 bp, Glycine max
gaaatgggcagcaaagaacaaacacacatcacagaagaataggccacaaccattaacctgcgctaaaagccattcaaatgatggcattttgatattccttggtaaactaagaacctgaaaaatacaatagaaacatgggcaccgagagacatctatcacaatagcatataagtataccttgaatgattaacaattctcttgactttcacttaaataacatactcaatttgcatgatccacttcttcaatccttttaattagcattaacaactatagctttagaatcattaacaatcctcttgactcttacttagatgacattattcgaaactacatgacactccgagcacacatccaaggatattttc

SEQ ID NO: 300114 - DNA, 405 bp, Glycine max
  unsure (1)..(405): unsure at all n locations
agctttataatttgaattaaaacgttcagaaacttctggtaatcgattacacagtgcaaattntgaattcaaattttaatagctgttgtaaatcagttttggccactggtaattgattacatcctctggtaatcgattaccagagagtaaatttgttgaaaaagactttttaacttaaatttcttggccaaaccttttgctacttcaattggaattcccttcctatataatataccctttctaagactctagagactgtcttgatcatccatcttgaatatctctaatttctttgtcttgaataaagctttgagacacatgtgaaactttggcatcatcaaaacattcagctngatcctttgtctactatctccccctttntgatgatgacaatccctgaaatca

SEQ ID NO: 300115 - DNA, 425 bp, Glycine max
  unsure (1)..(425): unsure at all n locations
tgcaattgacataaagggacgtcccanaatgactggtacctcatggtcttcctccagatccatgaccacaaaatcagctggaaagaccttcacttttatcaaaacattctcaattaccccggaaggtcttgtgatggatcggtcaacaagttgtaaagtcattctcgtgggcatgatttccaactctcacaaccttctacacatggagagcggcattaagttgctactggttcccaaatcaatgagagtctttctgatgtgccatcattttcttctatttcttaaaccctttntgcaccattttaattactgattagtcttaattgtcaaattaattaagcagttttattatttgggcacattgagctaatttgatgtttntaatctaatttcatgaattaatgaaacattgggcttaatctgga

SEQ ID NO: 300116 - DNA, 403 bp, Glycine max
  unsure (1)..(403): unsure at all n locations
agcttctttgagaaaacttccttgagaagctagagcttagctacacacacccttctcataactaagctcacctccttgagaagcttccttaagaagattcctaaagaagcttgagcttagctacacatacctctctaatagctaagctcacctccttgagatgagaagctagagcttagctacacaccccctataatagctaagctcacccccatgacaaanaaacatgaaaatacaaaaaaaaagtccttactacaaagactactcaaaatgccctgaaatacaaggctaaaaccctatactactagaatggccaaaatacaaggcccggatgaaggaaatacttattctaatatttacaaagataagcgggctcatacttagcccatgggctcgaaatcta

SEQ ID NO: 300117 - DNA, 398 bp, Glycine max
  unsure (1)..(398): unsure at all n locations
ntgatggtgtcgagaagaaatcacatgtctgtcatcatcttataaggggagaatgtgaatgtatgtatacatgattttgatgatgtcaaagaagaatttaacaaggctgcttcaaatgataagcatttgcttcaagaataattcaagattgcttcaacaaacaaagccttggttcaagattcactaaagaccaagccttgccttaaaacaaagtgctttcaagacatgcaaggctctggtaatcgattaccaggaagtgtaatcgattaccagaagacagggttgagaaatagcagttgaaaaaggttttgaatttgaattttaacatgtaatcgattaccatatgtctgtaatcgatcactagcaacggaactttggaaattcanattcaaaagtca

SEQ ID NO: 300118 - DNA, 368 bp, Glycine max
  unsure (1)..(368): unsure at all n locations
tctagcttattcgaagccccttgaattgattgtcgttcatgcatcctcaaccatngagtacggagccccatgaattgattgcctaacgctgttcatgcatccttcatcatcaaatcttattcggagccccatgaattgattgtcgttcatgcatcctccaccattcagtccggagccttacgaatagactgccaagctctgttcatgaatcctctatcatcaaatcttattcgaagccccatgaattgattaccattcatgcatcctccaccattgagtccggagccccacgaattgattgcctagtgttgttcgtgcatcctccaccatcttattcagagccgcatgaatngattgtcgttcatgca

SEQ ID NO: 300119 - DNA, 448 bp, Glycine max
  unsure (1)..(448): unsure at all n locations
tggagggtgcgtagcccaccatcttttcatagtggagtatcgataatgtgtctaccatcacgatcatcgtctccctttccattattgggggtaccacctgggccgccagatccctccaccttttgggcgtgttctttgaaagatccgtccccctttttgcacatgttctgtagttgcatcctattcagaaccatatcaaatttgtactgatactgcctaacacaggcaaccattangtccttccaagaatggactcaagaaggttactaagttagtataccangcgacagttgtcctagtaagaccttctcaggaaaaatgtatcagcagtttctcatcttttgtgtatgcccccatcttccgacagtacatctttagatggttcttggagcgagtaagtcccttatacttgccaaagtccggcaccttgaacttgggaatgaccatg

SEQ ID NO: 300120 - DNA, 357 bp, Glycine max
  unsure (1)..(357): unsure at all n locations
ttcttgcacgcttttaagcttttagaanggctagacatgatacatgtcagggtttggtctggctcaaggataaaatggatgccccacattatttccatgacacaaaaatgcaaaaatgatgatttggaaactttatgcaaaactggtcatgcatgcacctatgcggacactcgagtgtcaaatttttatggtcatgtgatgctatggctcatgattcatttcctctattttattcaacccaatgctttcaaaatatgttcttttatcaatttgtgcattcatccgagtccattttgggcgtctgggacattcttacagcattcacccttcaagtgtatacacattttttctaaaact

SEQ ID NO: 300121 - DNA, 323 bp, Glycine max
gaagcatgtgtaacacttgttggaactttgatgaatgagaatcttgtgagacacaactccaagttcaacttctcttcatttttcttccttcaatttcgtgctccccactctctctttctcttactctttcttttcctccattgaagcatcctctccaagcttcttatccaggctcatcatggtggaggagctccttcttccatggcttattccctagtggatggagcctcctctcacctattctactttgtctttcgctgcatctccatggtggaaaatcaccattgaatgacctcattgaagctcaatgatccagcctccat

SEQ ID NO: 300122 - DNA, 429 bp, Glycine max
  unsure (1)..(429): unsure at all n locations
cttgtgtaatcgattacactganttggtaatcgattacaagtgatagtttctgaacaaatcaaaagatgtaactcttcaaatagtttttgactttttcaaattggttttaaggttttctaaaagtcataactcttctaatggttctcttgaccagacatgaagagtctataaaagcaaggttttgctttgcatttcaagtatctttccaattcattcttttgacaacaaacttttgccaattgatttatgaatctctttgaacttcttcttcttcttccttttgccaaaagctttccaaagttttctggtttttccaaaccttgaaaacttgtgatattcatctttttcattctcttatccctttgccaaanagaattcgcaagggactaaccgcctgaattctttntgtgtctctcttctcccttttc

SEQ ID NO: 300123 - DNA, 452 bp, Glycine max
  unsure (1)..(452): unsure at all n locations
aactcaagctnttactatagcatagttgctgatgatgcccacatgtctaggcgtgaatatgttttctctgtttccttagcagcttttgctttttatgacgtccttcttcagcatgatcattttctctctctttccgtgattccaatctattccttcttggttccaaggcctattgtagccccacattagctcaatcatatatatgttagattcttcgttacttttaaataattatgtatatcttctactgtatagaaacgtgggcatgcaaccttattgctaacgtttatccggatattgaaataaagacgtgcttctttttctttcttttctgcaaaagagaaacaagtcttatagtctgaaactggtttcgttactagctatcagattcactgaaagaaaaccatctagctgttacctcagagattctttctattgtaagtttattctct

SEQ ID NO: 300124 - DNA, 434 bp, Glycine max
  unsure (1)..(434): unsure at all n locations
ctttaaggattgaaaaattntatatgttaagagagaaccattgtgaattgacatcgcctaaaatccaaaatggttacttctcagcaactgactggagctatggtaaatttaccatagaacgtcgtctaccatagaatgtcaccaacatcagaaccatttatccttggttttcatcaaaaaagatttataaatatggccataaacttagatctattgttgatgtaataactaatggtatgattgtgaaacctttttagcatatgaattattttttctttgtttataatagaacaattttaagtcacgggaaaaaaatacaaagagaacgaaggataagatatcataattagcatatgtaaaaagcagaaaacaacaaaaacaaagagganatcaacaaaaagatgttcacttcctcgacatatatactagtgaga

SEQ ID NO: 300125 - DNA, 447 bp, Glycine max
  unsure (1)..(447): unsure at all n locations
ntgagatgttgtagaatgactacgaccatcatggtgtggactacggccatagtgaattcaccatagccatcattggaaagctgacattgtttagtaggggagtcatcatattaccatggtcctattgagtgtaccacgaccatcgttaagtgacaaagtcttcaaatcttcagaaaaaatgcaaattccaactctttcactcaattcaacggctatacttctataagacaaaactagcattcaaatgagagttctgccaagaaaatacatgaaaatgacacaaaaaatcacataaaatatcactcaaaaagtggtttatcaccttgcccacacttgagcgttgcttgtcctgaagcaagtgttctagttctttaatcaaaacaattatcctaaatcagaactcatgtatctganatctccatttattcanatgtanaactcacatta

SEQ ID NO: 300126 - DNA, 438 bp, Glycine max
  unsure (1)..(438): unsure at all n locations
tgtagaatggctagacatgatacatgtcagggtttggtttggttcaaggataaaagggatgccccacattatttccatgacacaaatgcaaaaatgatgatttggaaattttatgcaaaactggtcatgcatgcacctatgtggacactcaagtgtcaaatttttatggtcatgtgatgctagggctcaggattcatttcctctattttagtcaacccaatgtttccaaaatatgttcttttatcaatttgtgcattcatccgagtccattttgggcgtccgggaaaattttcacagcattcacccttcaggtgtagacacatttttcaaaaaccagttatgatcagtgaatntttttcanagaanagctggaagttatctcttttcaaaagcatgttggttnttcagctagacaacttatttgctnttttctccttc

SEQ ID NO: 300127 - DNA, 430 bp, Glycine max
  unsure (1)..(430): unsure at all n locations
tgagtttactagtattntgtttatgaaatcagttttcaaattctcgaaagtgaatcaaacctgccctaaaaaatctttgttttctctcttcttctatattcttcccattctactcattttttctcttctttccctatcacctacacttgacatggcagtataacaccccaaactttttaaccccatgttatagaatcatcaaatatacatatccaccaaagaagtacaaacatagacatcatactcaagcttacttctcattatgtaaccatggatttctttccctaaattaaagcaacccaatcaaatgactgcttgtagagcactagttattgaacatgaatccagcaggtggaaatgagatagaagtggaaaaaggtggattcaacagtcttttaaattaaatagatgacactaagatggcacatga

SEQ ID NO: 300128 - DNA, 437 bp, Glycine max
  unsure (1)..(437): unsure at all n locations
tagaaannatgggtgaacatatgacatcnttcttatattttatctcaatttctctcttggttcttgttaagattatatatatatacacggacttactccactcaatgccaatgtctatctttaatgtttaaatttagagttgatctcttttctcaatttttcaattaaaattacatcaaagaagtcatatatttagagataatacattgtttattcttgataaggatgttcaaaactaattacacaagtgaggactaaaaattgagtcctgatacaaatttatccttgtacagaagtctttagtatcatctctaatgattctcaaactattaattatctcatcatttatgtcttgtataattcagatataagtcatgtaaatatatttctttgtcaaagctttccataatacttatctcaacactccatcaaatatt

SEQ ID NO: 300129 - DNA, 443 bp, Glycine max
  unsure (1)..(443): unsure at all n locations
tatgaaataaaagtatcgatatatgtgcatgtacacaatgctgcatcggaaattttagaaagaaggaaaaaaaatcaacaagattgaaaggccaatatatcaagtgcaaaagaaagtgctgccacataatttttatgcgttcactctataaagtgtaggaatttgagatatcatgacaaaaaagatatatgtaaatttaaaaattaaaaggattgggaaagaggaaaaataaaaattctactaaggtttatacaaacaagagaaactctatcaattcatgctaattagaagaaaaaacccaatttttagggttcacactcaacataggaacacatcaatttcacaacaaattcgtatcgagacaccaattagtctgtcaaacacagtcaatccacaattaanaacataagaacataattgaatntcataaaacaacccaagtg

SEQ ID NO: 300130 - DNA, 440 bp, Glycine max
  unsure (1)..(440): unsure at all n locations
taaagtatgcccgagtcattcatccctatgagatgttgttgaagtattggcaatcagaattgccattccttggattatagggttgaaccgagctcatgcttttacaaaaaggttcatcaagtcaggttgaaatatggaagtaaccatcctgcaaacttggggcaaaagatgaatcgagtcacatcactgcttcgtctactgccaaacatatttaggattattgatgtccttgttacttccagtttcaccttgacaaagatgtcatggaccatgttgaaaatctaaattgattcaaccccatatcctgcgtaaaaattcgcaatacttctacatcattcgcatgcatccatgcttttcattggttgcattgctcattgcattctcttcttgaaaaataaaataaaatgaacttatcaaaaaaaanaaaaaaaacaaaaaaa

SEQ ID NO: 300131 - DNA, 414 bp, Glycine max
ctatatggacgaaagtgcaaaactcctatttgttggtatgatgatggagaagcagtacttcttggacctgaaatgctacaacagattaacgaacaagtgaggttgattcgagagaagataaaagcatctcaggataggcagaagagctattatgatataaggaggaagccactagattttcatgaaggagaacatgtgtttttgaagggttctcccgtaaccggagtcggaagagctcttaatgctaggaagttgacacccaagtatctaggtccatatcaaattttgaagaagattgggcctgtagcttatcatatcgccttacctccgagtttatcgaatctgcatcctgtgtttcatgtctctcaactgagacggtacaacccagatccatcacatatacttgcagtggac

SEQ ID NO: 300132 - DNA, 430 bp, Glycine max
  unsure (1)..(430): unsure at all n locations
ntttcggggccatctcatgtgaaaacacatttgcaacgttagtttacaaggaaatgccattttaaagcaaaatcaagcaaaaacagcatacaactccttccaacaaaacgcaaatatcaatgtaaatttagagcaaactcatacaccaatgcacgtgtttttctgggacatacatttatgaacatacatgcatgcaagatattttgctacctatcttcacatatatgtgtttccaaagcattttcgctaaatttacatacatgcatactcaaggtattttgggctacgaaaaattacatacatgcatattcaaggtatntttgctaccaaaaattacatatatgaatatccaaggtatttttgctaccanaacattacattntatgcatattcanggtattnttgctaccaaaaattacatacatgcata

SEQ ID NO: 300133 - DNA, 435 bp, Glycine max
  unsure (1)..(435): unsure at all n locations
tagccctagagaggatggaccttttcaggttttggagaggatcaataacaatgcctataggttggacttcccagaaaagtatggagtcagcaccacttttaacatttctgatttaattccttttgcaggtggagctgagattgaggaggaggaactaacagatttgaggacaaatcatcttcaaggggaaggggatgatgcaatcctccctaggaagggaccagtcactataaccatgagcaagaggctccaagaagattgggctagagctgctgaagaaagccctatggttctcatgaacctcagggtagatttctgagcccatgggccaaggctgagtccaattatctttgtacatattagactangatgtcattatatttggtccttgtatttanggctccatattctangtagggtaccctataaatatac

SEQ ID NO: 300134 - DNA, 432 bp, Glycine max
  unsure (1)..(432): unsure at all n locations
tatgtcaaacagaataatccanaaatgccaaagaattgggtgttgaaaaagcataacaagactttctgtgattggtttaaagatacaatctttgcagatgaaaatgcttcagaaactttaagaaagctagcagatgggcctaaaagaaatgctataacttggcaaggatacgacataaacaagtattcattttacacaaatgaacaagatgacaaaggcacaatgcanaatagcagggtcatcctaagggctgaatctcaacactttgcaagtgtgcatgatgccaatccctgtgtagctgtcatcccttactttgggttcattgatgaaatttgggagcttaactatgtgaaatttactatctgtgttttcaaatgtaaatgggttgacagtaacaccggtgtgtgcaccgatgatatangatntatgttg

SEQ ID NO: 300135 - DNA, 420 bp, Glycine max
  unsure (1)..(420): unsure at all n locations
ggaatcggacctgagtgtgaaaagttatgaccatttgaatttctcgattgtctttcgttgntcaatgtcgagcatctcgacatattatgcgctcgaatcgaacatccgagtgaaaagatatgaccatttgagtttctcgagagcttccgtggttcaattccgagcatctcgacatattatgtgcccgaatctgaccttcgtgtgaaaagttatgaccatttgaatttctcgagagcttccgatgtttaatttcgagcgtctcaatatattgtaagcctgaatcggagctcagtgtgaaaagttatgaccatttgtatttctcgacagcttccttggttcaattccgagcgtctcgacatattatgtgcccgaatctgaccttcgtgtgaaaagttatgaccatatgaatttctcgagagc

SEQ ID NO: 300136 - DNA, 441 bp, Glycine max
tcctgcatcccatgtgttcggaaatgtaaagtttacattccatttacccatcataaccaatctgcatcgtcacccaacatcgccactaactgccctcatcgcacaattacattatgttcattggtatgcgttttatgttcattggtgaatctgattgtggcgtttatttgtgttatgttgtggaacaattacgtcgtcagcatcggagaaatcactgacgacggcggcacatgtcgaagagtgacaagaggagccatgggatgggagactccaggaggagggagacaaagttttgatgtgggaaggtgcacaataaaattatgcacatagattaatctgaaagccaatgatagtgatccacaaagatcacttaccctcatggtccaccttagacgcagttttttttttttttttttggagtcctcacttttcatattatgc

SEQ ID NO: 300137 - DNA, 445 bp, Glycine max
  unsure (1)..(445): unsure at all n locations
tgtaggccttggatcttcttcatcaatggattcctttgcttcttgatgtctgattgcagcagaatggagaaggagaaagatgaatggagacgccacttcaagtagaagatgagtctagaaaaagctcaccaccataggatgccatggataagagcttgaaggtagaagaagatgaatgaagggacaggaaaagaagagcacgaaatttagtgcctctaaagaagtctgaactttgaagtttaattctcaaaatgatcaaagttcaaaaaaatgcacacacatgacctctatttatagcctaagtgtcacacaaaattagagggaaatttgaatttctattcaaatttcacttaaatntgtggagccaaattttggagccaaaatttcactaattatgattagtgaatnttagttatggttcagcccactaatccaagatcaagtc

SEQ ID NO: 300138 - DNA, 435 bp, Glycine max
  unsure (1)..(435): unsure at all n locations
tataaatggatgatgggttacttaattaaacaagtattgtatttgagagtaaaacaaacaagaaaacatcatgggttggatatgatccagtgcatatataattgaggaggatgagaggaataacaaaaagaaataaaaaaatagaagaatggtgggggtgctatggaagaagatcaaggcaaaggtgaggaaggaatagttatatatggcatgtgtgaaacaaaggtaaagtgtgagaatgaaggtaagaagtgagagaagtcacaaactatagaggttntttaatttcactccaaagaactatgcatgcttcatgacacaacctttctttaagtatgagtagggttagattgagcccaagattaaagcattgtcttannaaatgtattgtttggtttaatgggaaactagtctgatgaataatctanatactct

SEQ ID NO: 300139 - DNA, 439 bp, Glycine max
  unsure (1)..(439): unsure at all n locations
cttatagagaaaatgatggtatgattntctacccaatcttattatgttgaacagctatatattaaagaagtttaattattttgatgtgaaacatgtttctactccttataactcatccatcaagttaaagaaaaatttgagtaaaggattttcttcacataaatattctcaaagtattgattccttattgcatttgacaaacttctctaggccagacattgcatatgcagttggtagattaggaaggtatactaataatcctgatcattctcattggattgcattagaaagagtttttagatacttaaaaggaatcatcaattatgacattcattatacatgttntcctgcagtaattgaggggtttaatgatgcaaattggatttctgattctgatgaaacanaatcaacaagtggttactgttttactttagctagt

SEQ ID NO: 300140 - DNA, 417 bp, Glycine max
tgcctaattaacctgaaattgataggaaatgattattaaattttcaaaatgggagtactaagtacttattacctatatttaacaaaaagtaattacaacactacaaaataaccataaatgagaggagttagatacaattttcacagatttcttacacaaaagttagtcgtatttatcgactaacagatatcattccattcatgattatgtgcaaaaatgcatttttgatataaagtctttagacacaaatcatcaatggattgatatcttcactaatcctttgtctaaagaaagcttcatctgtataaaggaacatttaacatatgattagcttatcagattaatgaatatttcttggacgataacatcgtattactttcttatcattaatccgctgggactaatgtttgttgaagt

SEQ ID NO: 300141 - DNA, 424 bp, Glycine max
  unsure (1)..(424): unsure at all n locations
tatccagaagaaggttagcagatatattttccttgtaataatatttcttgtttacttaccaatatgataggttgctgcttgatgtgagctttaactttttctagaagctattgactactattagttgaattaagtagtgtgttatgttggttgaagataaataaaatgatattgggtttgtaatgcagctggaagatcctagcattgacattcacaaggaagggaaatacttgatgcttgctgttcaggagctggtttcaggggatcaatgtgaacgaaggtttgtatttggccgcgaaagccggaagcctaaggcctccaatgatgaaaacaaatttacgaaagatggaacatatcccaagagcttgctgcagacactgttgatgcgagcagggcactccccaccanaatacaaaacgaaaca

SEQ ID NO: 300142 - DNA, 436 bp, Glycine max
  unsure (1)..(436): unsure at all n locations
taatttcatccaaggatgacaaagtgtacccactctctatgtgtatccgtaaaaatatctacaaacgggtaggattaatacctgtttattagggatgggttcgagatggatatttactgacaaaaaattaatggggatgggttcaggtatgggtactatagtaccgatcccatctcacctcatcatgcccctatgatatatattagtttgattaaaatatcttttatatattactaattattaatttaatggcaattggtaggcaacctaacctttgttgatgcacataaatttgtcatgcctttatgtgaattatggatcaatacatttggaacgcatcgtagattgaatgagaactggttttgaaacttaaggtaatgcacaaaatatcatgtaaatttacccctaatacattnttttaatgcttaataaaatc

SEQ ID NO: 300143 - DNA, 437 bp, Glycine max
  unsure (1)..(437): unsure at all n locations
tggggccatagtctccacaccccacttgacaatgaatttctctacactgacaagtgagattgtaactatcaagattgaccaaaagcaagcgcgacagtgctatgcaaagatcctgaaggtagcactatatcctcccatccgagagccgaccatgtctcacatcacagtgactaaagactctcaagtcatgacagtggacgaagggtctcanaactgagccctaaccatctgccaatccacccacgacgagtgacatgtgctcacgagcaccccactaagcctccaatacgtgccacccatggcatatttgcacgagcatattgctatgtctccagcatatgtcacccacggcaagtgacatatatgcanaagcatactactaagccttcagtacgtgccacctgcggcatgtgcgcacgagcactctgctaagtctc

SEQ ID NO: 300144 - DNA, 445 bp, Glycine max
  unsure (1)..(445): unsure at all n locations
tcgggctgctcaattgctccaggttgctgcatggaagggcatatgtctgtatggtggtcaatagaggagcataaaccacagacccttgcaacaggtacaaatttctggttcaaggccagctgggttaccaagttaaccaatgcatccagttttccttcaagcttcttagtttcagatgatgcagctgagtttgtagctacctcatgcactcctctaatgactatagcatcatttctggcgctaaacttctgggagttggaagccatcttctcaattaaatttctgacttcagcaggagtcatgtctccaagggctccaccactggcagcatctatcatacttctctccatattactgagtccttcataaaaatattggagaagcagctgctctgaaatctgatggtgagggcaactggcacatagttnttaaatctctcccagta

SEQ ID NO: 300145 - DNA, 439 bp, Glycine max
  unsure (1)..(439): unsure at all n locations
nttacctgcttatcttgacccanatttgcaacttcaagatctcctcactggtgtaagctttgcctcaggcggtgccggatatgatcctctaacagctgaattagtggtacataaccatatattcaaccttgttcatgctatctatcaattaataatttactttggcacatcttagagctaactccagtctattttctccttgtcacaagaatgtgatgtcattgtcagatcaattagacatgttcaaggaatacataaagaagataaatgaagcggttggaagaaacagaacgacaatgatagtatctaagagcatatacatagtatgtgtaggaagtgatgacattgccaatacttactatcaatcaccttttaggagtgctgagtatgatattccttcatacacggacttcatggcttcagaagcctcanaattctt

SEQ ID NO: 300146 - DNA, 440 bp, Glycine max
  unsure (1)..(440): unsure at all n locations
tgtccgcanaanatcactcaagaccgttttaaggtccaacgccttanaacggtcctctttgcttatattggttaaaatggaccattcaaagcataaaatcaacatataaatttatcgcttttgcaagaactacgtaggtatgattttctcatcacaattgaggatacgtaggagcaaaagccccacttttgtcgaccaccccaagagatcgttaattatccaacgccttaacgcttctctcatttcaaaaatcaagagatcattaatggtccaacgccttaatgtttctctcctttcaaaaccaagaaattgttaatggtccaaacgccttaacgtttctctccttttcaaaaatcaaaagatcgtttaaaaggtccaatgccttanacgacttttgttcggttaaaatatatcttgcgannaaacataaaaacaactta

SEQ ID NO: 300147 - DNA, 448 bp, Glycine max
  unsure (1)..(448): unsure at all n locations
tatgcgcatatttccctacgaacgttcacttgcacaagacattctattatactaagaaaaatgcacccatatacaatcaaggtagcttccttacctagattatttacatgtacttccaaagtgtatttgttatttacatcatacacgccatcttgtcaaaatttacacacatgcatactcaaagcatttcggggtaccaaaaattgcacatgcgctcatcttggtatttctaatatctatacatatacaaacttcatgatgaatcttgactatctacacaataaagtgctacatttcatgcctttnttcaagtttttgctacctaaagccgcatgcaaattcaagcatattttcctttgctgactaaaattgcattcaaatttaaaaggtatattcttttgtaatatgttttcttcccataacatgcaacatattcatcatatatttt

SEQ ID NO: 300148 - DNA, 441 bp, Glycine max
  unsure (1)..(441): unsure at all n locations
ctaagcttgacattggccatgctaattnttttttggaaggcaaaagatatataatttatttataatagaaaaactagtaccagtggccatgctaatgattgctaatcttgtgtttgtcctccaaaatttgttttctgggacataaaagatgtaattgattaaaaagctcaatttagtatccaatttttgattgtgtttagatttattggctctttatcaccttgcattttgtcgcaaattatctgacaacttttttctcccctatttaaaccagagtcctcctgaagttcatgccaacgcggctgaaacattgtgcacaataactcgaaatccctcatcgactctagcaattaaactttcaagcccaaggtttgtattctatggntntatgttcttctctgatatgtaactctgaaataattatgtatatttttatatatg

SEQ ID NO: 300149 - DNA, 435 bp, Glycine max
  unsure (1)..(435): unsure at all n locations
taggaacccaaactttntaagcttcagtgcaagataacatactcatgactaggaacccaaaatttggttttagaattagaaaagcatgaaaatagggacttgtttgtaagaatttgggctgccccatgattggtactttgcacctaagtaacgtgggaaatgcttttcaatggtgtgtagatatgtgtgtaaatataaggggcataaaattcctcgccaagtatgaataagttgttttcctaagtgaatgtatgatagcatggaatgcccttttgaatgcaaatgtgtgcangatgtaattagctttccgatatgcatttaaataaatatgagagaaacaataaaaatttgtatgaggtactttaaatgtatgtaggtagttcgtgatagaaaaatgtttaggatataaattacgtgtaaagtttgacgcaacac

SEQ ID NO: 300150 - DNA, 433 bp, Glycine max
  unsure (1)..(433): unsure at all n locations
tcttagtttcagctgatgaagatgaattcgtggctacttcatgcactcctctaacgacaatagcatcattttggcactaaactattgggagttggaagtcatcttctcaattaaattcctagcttcaacaggggtcatgtctcctaggactccaccactagcagcatctatcatacttctctccatattactgagtccttcataaaatattggagaagaagctgctcagaaatctggtggtgagggcaactggcgcatggtttttgaaatctctcccagtattcatataggctttctccactgagttgcctaatgcctgaaatatcctttttgatggtcgtggtcctggaggcagagaanattttttctaagaatactctcttgaggtcatcccagctcgcgatggaccttggagcaaggtaatatagtcagt

SEQ ID NO: 300151 - DNA, 406 bp, Glycine max
  unsure (1)..(406): unsure at all n locations
tatctgggctngggtcaggttgctatcataaggcggttgggttatgggtctataatagggtccgtggtaaggccaccctcatcatcatctacaatcaacaaaaatactttagaagcgcatttgtggccacgatgatatttttcatcacaattaaagcaaaggccacgttcgcgacacagggtatctcctcggaggataatcttttaacaggcactggggttgatggttttaaagggttgagcancgaggacgagggaaaggaaagggtggacgaagaaggagctgaggcatgtggaaaaaaattgtgagcaggaatggcgttgggacgaccacggaagggccgacgagtgtcaagaaacttctcttcctagagccaagctaaccccgccgcttgaccaatgtcaac

SEQ ID NO: 300152 - DNA, 229 bp, Glycine max
aatcaggggaattccgacttcagaagaaagcctagaatcaagaatccagactcgcgatctccagaatcaagatcaagattcccgaatgaagaaaagactccttcagatcagtttagaagtttttcaaactttgaatagcacatgagttttgacaaacctttaccaagaggtttactcttggtatcgatacatcttgtgtatcgatatcagtagcaaatgagttgaaaag

SEQ ID NO: 300153 - DNA, 423 bp, Glycine max
  unsure (1)..(423): unsure at all n locations
tgagatgaggaagtgttgaagggtgaaacttcctgcttttattgttgaccacagagtggtacctggagatatgtcgcgggggtcaggagaccttggggacatcaggtggggtgctattgcccaaaaccaagcttgaccaatcccgacccaccccgggcatagtcggtcagtgagaacctgtgatgtacctaaacaggcgagctcctggcagtcaacagataaaaggaacaaagaccacaaagcaaagaggcttgtggtggctggccagctgtgaactttgattgatatgtgggttgtggcctctggtaatcgattaccaagggtgggtaatcgattacaaggcttaaaattgaagacagaaggctaagatggtctctggtaatcgattaccacggngtgtaatcgattaccangcttgaaaac

SEQ ID NO: 300154 - DNA, 425 bp, Glycine max
cttttgagaaccattgctcttactggtaatcgattactttaatctggtaatcgattaccagagagtaaaaactctttggtaaaaggatttgagaaaaattcatgtgctactcagcttttgaaaaaacattttcatacttatcttgattaagccttctcttgattcttgaatcttgagtcttgaatcttgatctcgattcttggaagcttgaaccttgaatcttgattcttgattcttgaaatcaaatttcctcttgaatcttgaagtgttcttgattcaatcttgaacatcataaacatcttgaacatcttgaactcattctttgattatcatgaattgacctttgagctttatgtcatcacctttgttatcatcacaacatctttgaatcaatctagattcatcatgaagctttgcttctacac

SEQ ID NO: 300155 - DNA, 438 bp, Glycine max
  unsure (1)..(438): unsure at all n locations
tgcctaattaacctgaaattgagagaaaatgattattaaatttactaaatggaagtactaagtatttattgcctatacttaacagaaaatacttataacactacaaaataaccataaattggaagagtttgatacaatttacacaagttttatacacataagttagtcgtattcatcgactaacaatggtccaaaatttaattggattgggcttctcccaattcaattaaatttctctcccaacacacacacatcaaatagtgcacttaatgcatgtgaaattacaaaactacccctaatacaaaaactagtctaggtgccctanaatacaagggctaaaaaatcctacattactagggtaccctccctacactacggagccctaaatacaaggaccaaaaataatgaaaccttaatctaatatgtacaaagataagg

SEQ ID NO: 300156 - DNA, 411 bp, Glycine max
  unsure (1)..(411): unsure at all n locations
tgctctanantacattaatgtttgtatgccattnttgttttaagaatagtgtcccactggtaaaactaactttccaaatgtttgccttcgcaggaaatggccccgaggaagcttgcctcaaagaggtccaggaaggacaaggcagccgaaggaactagttccgctccggagtatgatagtcaccgctttaggagtgctgtacaccagcagcgcttcgaggccatcaagggatggtcgtttctccgggagcgacgcgtccagctcangaacgatgagtatactgatttccaggaggaaatatggcgccggcggtgggcaccactggttactcctatggccaagtttgatccagaaatagtccttgagttttatgccaatgcttggccaacagaggagggggtgcgtgacatg

SEQ ID NO: 300157 - DNA, 436 bp, Glycine max
  unsure (1)..(436): unsure at all n locations
tcanaactaagaaagaaactattnttggtgaaagaaattggaagaagatgatggaggatgtctcctccagcctctaaaccctaactctctcagtttttctgaactaagctctctttgttgctcaaaactcatctttctccttgaaactccgccaacctcagtgttttaaaggctcttggactcttcagcttccgaaagctcgctgagcgagcatggctcgctaagcgagagttagtgaattttcgcttaacgagagtgggcgcgctgagcgcgagaagagacaacatgctcgttgggcaggctggcttcacgctggacaagcacatctctgacttatcatcttctanggtttcccaatcaactaagcgagttggatgccttgcaaagcggatgcatctcgctgagtggatntacctctctaagcgagtcatcagct

SEQ ID NO: 300158 - DNA, 441 bp, Glycine max
  unsure (1)..(441): unsure at all n locations
tgagcgtagtggaagaaaagttcttgaatagaattttccctccttctagatatatcagtgcaaagtcagatgtttccactttcaagtaagaaccagatgaacccatttgtgaagtctggaagtgattcaaatcattgttgagaaaatgtcccaatcatggttttgatgatgttacccagctaagcatattttgcaatggtctaaggcctaaaactaagatgattctggatgcagtcgctagtggaacaattatgtttgtagatgttgaacaagccacaaggataattgatgcctttgcttcaactgatcaccaatctcagcataacagacaatcgatacagaaaagaggagtgttggatctcattctcaagggtttttcaaaggaagtgtaaaaacattntgttgtggtacctataacacaagagacgctgagagaagctc

SEQ ID NO: 300159 - DNA, 432 bp, Glycine max
  unsure (1)..(432): unsure at all n locations
tagccctagaggggatggaccttttaggttttggagaggataaataacaatgcctataggttggacctcctagaagagtatagagtcaacaccacttttaacatttctgatttaattccttttgcaggtggagttgatattgaggaggaggaactaacagatttgaggtcaaatcctcttcaaggggaaggggatgatgcaatcctccctatgaagggaccagtcactagagccatgagcaagagactccaagaggattgggctagagctgctgaagaaggccctagggttctcatgaacctcacggtagatttctgagcccatagaccaaggttgggtccaattgtctttgtacatattagactangatgtcattatatttgatccttgtatttanggctccataatgtangtagggtaccctagaaatat

SEQ ID NO: 300160 - DNA, 439 bp, Glycine max
tataattctaatatatctcttaatgagaacaatgcatgttattgttacagttcttgagattactttcacaagaattggacgatggttcttctcaaaggttagatcaagaacgtgctttgtcaagtgcggttgatggtatagcacttgacatgcagagaaaatccgagtcttctgagtgtaaaagagagaagcttcgtgaatatgagcatcaatgtcgtgagaagatttcaattgatgatgttcagcctcattgtgaaaaggtggatgcacatttggaagttcagaaggagacggatgctgctcctttacttgactgtaaagagacgcagcagggatctgttgattggaaaattgatgagagaccgattgaggaagtaatgatgctgagtgatcagaggaaggtgacagttctgtatgaacttctgtctggttgtctatc

SEQ ID NO: 300161 - DNA, 318 bp, Glycine max
gtcttatgataaggatttttagattagataaatacagagaaataagtgtattaaaataatactttgagagaaaataacaaggcctttcatttatgcatttgataacaaataaaatagagtttgtatttataaataataaaaataaatcaaataacacgttgtgagtactctaggtataaatagcgatatgctaggctagacggtagctcttacgattgttcatcctttctattgtgtccttcctctcctcctgctcaggatcccttctctatcctgcaacccaccatacctatcttagacaatctacgatctcggact

SEQ ID NO: 300162 - DNA, 434 bp, Glycine max
  unsure (1)..(434): unsure at all n locations
tgcaccaattntgggaaatctgtgagagttggagggtgaagtcataaatgtcccttattatactgaggcatcatcgcaggtataccttgtggaccgaacccagtcacttggaacggaaggtaccttggaaattgttggtgactacagctgctactactatcataaggaagcattcgcaagcttggtgatgaacatgattgaaattgtgccataacatcatcatcatagacatttattggaagagagtagctggggggaggatcatgtatctcatccgtttttgtctgtggaataagctgggatagggtatttttagactgctaaacacaaaagttatgtaataaataaataaacaatgagcccaaaatagatggaccagaanatgctctaagagaattntaactccttgaaggagaaagatgaataagaatatc

SEQ ID NO: 300163 - DNA, 367 bp, Glycine max
tgatgctggtggtgtggcaaagaatactaatgattagtgaatttgtagtgaaagagatgaggctctaaacatatattataaaaagccatagagttcacgtctaaagtacagaactttctggtacgcatatgtaattaggagcacaatcgattctaactcacaaaaaaaaaactagcggttgtgttacccaaaatcccatattcctcccatccaaacagcaataatattctccaaagcaaaataacattagtcgtccttaaattatattctattaatcaaagattaaaattgagtatgcggatatatatctatgaactgcaaggatcaagaattcaaggtaaaaagctacttggttagatatgtacca

SEQ ID NO: 300164 - DNA, 437 bp, Glycine max
  unsure (1)..(437): unsure at all n locations
ttcttgcttcttaaatttcattcctgctcttggttacagttatcgttcatgcctaaaactgtcacatcacaacttagatcttaattgaattttctagcttactaacccatattaaataatttcaaattagggactatactaattatttcaactgttgttttcatatggtgttgattttgtgcatgttaatctgcctcatgaaattttgttattcatcgttgtatcagcatgacaatgaaaacactattattgtgttgtcgaccaatgccacaattaaagagggccaccctgtactatgatatatagttacttatgttggctttctttcacaacaaatatgttgttttattgttttattntctatgtagctggttggttattcatgttttttcctggtatggatttcttcaactggagaggagtttttcttacataca

SEQ ID NO: 300165 - DNA, 436 bp, Glycine max
  unsure (1)..(436): unsure at all n locations
tataagaaacaaaatgcatcaatcatttccaaatatgcatgtgaattangacgcatcaacaagaatcaagccaaggttattgtgcaagcaatcaatggggcaaaacacaccaaatgattatgatgatggatggctcaaattctcacaaaggtaaactcatcactttcaaattgagctttcaaaactatcatgacatgtagatgagaatcaaggatttcaagtcacaacatgccaaaaacttttattttcaaaacaattacccatttcttgaacatatcctataattcaaagaaaaacatgcaaagtcgtacatgcacacaaaattgacccaaaatattaaactaacaatccgacgaaactaacaacattaacaaattaacaaaaccaacaaaactagcaaaaccaaagaacaccccccncccccccccatacttaa

SEQ ID NO: 300166 - DNA, 420 bp, Glycine max
  unsure (1)..(420): unsure at all n locations
ntattcaagacaaagaaatttaagatattcaagatggatgatcaagacagtctctagagtcttaggaagggtatattaaataggaagggaattcctaactgaagtagcaaaaggtttggccaagtaatttaagttaaaaagtgtttttcaagagatttactctctggtaatcgattaccataggatgtaatcgattaccagtggccaaaaatgatttacaacagctattaaaatttgaattcaaaatttgcaccatgtaatcgattacacatatatggtaatcgattaccagcagttattgaacgttttaattcaaattttaaagcttgtaatcgattacacacatactgtaatcaattaccagagaagattttcaaaaaatattctcaacagtcacatcttttcattntgttcttgaat

SEQ ID NO: 300167 - DNA, 501 bp, Glycine max
  unsure (1)..(501): unsure at all n locations
cggcgcgcggnnttganaccgtagctacttcgcacaccatagaacactcaaccctgtacgcctangatcttcttcatcaatggantcccttgcttttcggattatcaatggcagnggaatggcgaacgtacagagagaggagactccacttccccgacacgatgagtataaaagaagctcatctccatacgacgccatggatccgaccttggacgattatcgatatgaatgcagcggatagatagacgagcacgaccctttgtgttacaaggagccctgtatctgtagaaatctnctctgatcatctctgaaaaaaatacacacacatgacctctatttatctcctaagtgtcacacgaaatcgcatgtatattcatatcacacttgtattttacattgaattctgggaactcaactctggagctcacatctggctgattatgatcaccgacatttaatgttgtgtcacctcactaatgccagaccccataccagattccc

SEQ ID NO: 300168 - DNA, 440 bp, Glycine max
tcttgatgagaacgttggggtccacattccctgaaaccgtttccttctcttgttctgcatctatctcggtggtaaacacccctgtgaaaatgaaaaaatggactcaaataaataaccaaacacactatttatctcaaagatatggctatagagatatgagattttgtttttttcttcaaggaacaaaaaaaataataataaagctttcaagagtgaaatgagatataacatgagatttttctgatagatgcttaacataccatcaatcttctgcaagattttcttaactttgttcttgcacccgtcacagtgtatgttcactttgagaacacatttctgcatgtacaagcaatcccaagaggcaacacagaataaagagaaatttcgttgtaaataagaggagatattgaaatggggggataaaagtaaaacacaacatg

SEQ ID NO: 300169 - DNA, 446 bp, Glycine max
  unsure (1)..(446): unsure at all n locations
tgtctttntcagggtatacgaaagaaggcccaggaaattcaaaaatttaatgactgccctcacgtactgtctcgtggggggtatgaactgcttgacaagaaacttatggaggagaagagcaagcgtggacatgaggaacattcgtgtactgaaagcccaacactcaacatcgacccaccatccctagttgcaagacacttgaagtggaagatcgcccgcactaagcggcatggccaaatgacgtctgaagtggcacaagaaattgcagacaaaattgtcagttcatatatttttttggttactatcattggcaaataatggttagctaacctagtcaaatttgttttattcaaattcaacaattgtatatgcatgcaggattcattacaggaacaagcaacacaggggagttntgttctgcatgggcgacaggacatactcaacac

SEQ ID NO: 300170 - DNA, 267 bp, Glycine max
  unsure (1)..(267): unsure at all n locations
agagtcgctgatatacacctactccatcatattaagttcgtctgactctttacgtctccaaacggaccgaagctccgagacgctgactatatgctcgtacacgccacgtcatcattcactctttctttgcagtacaacgaaaatcctatgcacctcgtatatctataaaagatttcattgaatgcttaaaagcctatacctgaattaaaggccttacgtcttgggataccatatacttgtaccaanttctataaaaataaatacgct

SEQ ID NO: 300171 - DNA, 444 bp, Glycine max
tgaacactctaaaaagaaatgcaagtactcaagatttttcaaaggtgaaagaagtgcctaagagacattgagacatagaagcctgcattgccatgtttgcaaacaacagcatccaaagcaatgaaaaaattcacaaggtatggaactaagttactgaacctgtataagagatgccatcatcattgtccattgtaatcattggtggagcatatggggagacattggatcgagcagtgaagttagatgactttactgcaggatcagaaaccctttcctggaaacaaaaaaaaaaaaaaacttgctaagcatctaaaagtcacactgaatatgattagaataaagaaagaacctagagtttccagtatttcacaaatgcacaaatacttcattagctttcttccttttcgttacttttgctctgtttcactttcctatatttcttac

SEQ ID NO: 300172 - DNA, 436 bp, Glycine max
  unsure (1)..(436): unsure at all n locations
tncatcaggtgctaagcccaatttcacttactcacgctaatctcgagggtggcgctaagcgtagcgtcacgatttcagagcctatttaaagcttgtcttgtgtagaattagggtaccacttttatgacagcttctacagacggtcagggcacagattttcagagcagccacgggcctatttatggaaaagagccctagaagcataaaagaggagcaacttatgcattgaagcctacgttttgtcatttgagagattattgagtagagagtgagtgtgagatgttgagaagaggaggaggaatcccccttcttatgtatggaactatcattctctgcttttaatctcatttattattagggtttctttgtaatggctggctaaacaccctagttgagggattttaatgaacacttgatgtaatacccaatatctaat

SEQ ID NO: 300173 - DNA, 422 bp, Glycine max
  unsure (1)..(422): unsure at all n locations
ntgtcctcagatccctcttgttggactagacttataccaaactacattattgtaacaacatacttaaaaccaaaacttaatctgcagatccctcttgtaagactaagtttcaattctgcttcattcaagttctaaggaaacaatacatttcccaatgttaaaatcacctaactaggcacacaaatggttgatcagaccaagagcatacaaaatttaagcactggaagaagcattgaacacaagaaacaaaatcaattagatatgaaaataattacatcgactgttcattataaatccccaacaagggtatttagccaaccattacagacgaaaccctaacaataataagcttacaatacctaggaattttattgatatgattcttaaagtagatacaagaattaagaaacttacctaagaat

SEQ ID NO: 300174 - DNA, 424 bp, Glycine max
  unsure (1)..(424): unsure at all n locations
tgtagagaggagttgctaagaaattgaaattctctcattnttacaaagaatttcaattctttcattctctgttgaataaaattctttattaaaatgactaaattcaatttctctttaaatgatttatccaaacatgtaattttaccttgaaatatttcaattacatgattaaaatgaattacccagttaaaagtcatcatctaaacacactcttattgattttatccggctcgtctagtggaatttacctgtagtcgagacaaaaaaaattacaaaatacccaaaatgttggtcaaacaatatgaaatcgaggagcagaaaatcaattcgtgccccaattgttacccaatcatacaaagcaaatcaatcaactctatagcgtagagcatcgtacaataccaagtccagccgcacaaaatcaatc

SEQ ID NO: 300175 - DNA, 435 bp, Glycine max
  unsure (1)..(435): unsure at all n locations
tgtaggattatggngtacccgtcacatgtggtactatgtggcgatcgggcgatggtacaagtcgactctccacgtccacaaatcacacataaatccaccatccccagttgcccaccttcaactgagctcacgtactcccacatagcccttatcctcgttcctctcaacaccgggtccccatcaatccctccaagcttccacaacatccaagcaattaaaaatccaaacatcatgaactatcaaaaccaagaaaacagggcagaggcaaaaaactctgcccaaaacacaaacaaataccacaactttccttactcaaatacctcagtaacattctcttcgttcctattcgttcaccgttggatcgtctcgaanaatttactggaggtccctagtacataaatctacactttgaccgttgggatctgctagaaaaca

SEQ ID NO: 300176 - DNA, 345 bp, Glycine max
ctccaataattcaaatggtcataacttttcacacggaggttcgattcttgcacatgatatatcgagacgttcgtaattgaacaacggaaaccctcgagaaattcaaatggtcataactttttactcggatgtccgattcaggcacatcacatatcgagacgctcggaattgaacaacggaagctatgaagaaattcaaatggtcataacttttcactcgaatgtctgattgatgtgcatcacatatcgcgacgctcgaaattgaacaacggaagcaatcgagaaattcaaatggtcatacttttctgaccgatgtgcgattcaagtgcatcacatatccagacgc

SEQ ID NO: 300177 - DNA, 431 bp, Glycine max
  unsure (1)..(431): unsure at all n locations
tgtatttaacaatgttntanaaatacttttaattaatatttgaatttttattcctttattaatatatatgtgaggggtagagggtgtcacactatatataattgtttatgttttagtgttttaatgataaacttatttgactaacaatggattagggttactataatacctanggtttagtgttatatgtcttattagggttcagttttacttgaatacgtaaggcttagtggtatgtgactaattaacgttcaatgttagttcagtacttanggtttattgttacgtgactaatatagggtttatggttgtgtgaatacctaaggtttagtgttacatgtcttattacggtttagttttacttatatacgtaaggtttagtggtatgtgactaattaacgtgcaatgttagttcaatacttatggtttat

SEQ ID NO: 300178 - DNA, 291 bp, Glycine max
  unsure (1)..(291): unsure at all n locations
tggagtctgcacgagacagtcatanactatgtagatgtcgtgtttagtacacggcgatacagaatacactcattgtggcatgacatgggaaaagaccacaactatagcatatacattaaaagatgtgtgagtccagtatacatatagatgataccttcctgcattcattggggctcaagatgattatatgtgagtcttagactcttctactgcctaaatatatagattctgtagacttggacttacataatcacgaagtctatgatgtcgtggaccatgacgataatgcta

SEQ ID NO: 300179 - DNA, 369 bp, Glycine max
tttccgtaattgtggtataagtgtatcataaagtcttttccataagaattagtcacaattgccttttggaatgagttctccaaacaaaaaactaaccaagcaaaagagtcaaaacaaccacttacctacagtatctacctcaacccaaccctcaaaggagctatgcacagaatgtagatgctacctcgacccgaccttggcggagctgcaccaaaacaaccaatgttcgtgacattcgacggatataacgatgtctacgccagtgcaaccttcacggaaaacatacttgaatgaaaatggaagaaggtgttgggagtaggtcagctgcttttaagacaaaggttgaataaaggaaagttaaatacatca

SEQ ID NO: 300180 - DNA, 412 bp, Glycine max
tgccacccagcttgcccaggcgagctcagctcgcccaggcgagcaaggttgcttcctccagaagcaacagccttctggaggaaggatctggaaggcccaagtgggccatattgctatttgcactcccattttactaaatgcacccccttctatttttttggtaattctttttccgtaacgttacgaaacttttacgaatttcgtaacgatacttattttccttccgcaaggttacgaatccttacggattatgtatttactcttttttagctttcgaagaagttacgaaaactcacggattgcgcaaaaacacctcttttcgatttccgccacattacagaatttcacggatcgcgcaagcctgcttccttttgatttctgacacgtctcgggacttcatttattgtgcaac

SEQ ID NO: 300181 - DNA, 443 bp, Glycine max
tgagatatccgtaaagatcaaagaagaggtgaaaaagtagttcgtcactggctttttggcagtggttcgataccccgaatgggtggccaatattgtgccggtccctaagaagatgggaaggtatgaatgtgtggactattgggacctgaaccaagccagtccaaaggataacttccctttaccacacattgatgtccttgtggataacacatccaatttcactttgttttccttcatgtacgggttctcgggttacaatcagataaagatggtgccggaggacatggagaagactatgttcgtcaccttgtggggaatgttctattataaggtgatgttctttaggctcaagaatgctggggcaacctatcagcgggctatggtagcattattccacgatatgatgcacaaagagattgaagtctacatggatgacatgattt

SEQ ID NO: 300182 - DNA, 381 bp, Glycine max
tcaataactgttcatgtccattacctgtagaaatctcacaaatgtctggacttaccttcttaaccttaacctacaaccaggtctctggacctattccatctgaattgggaaagttgactcgccttatggcacttgatcttgccttcaacaatttcactggaccaatccctccaagccttggaaacttgagttctctcctatggctaaccctttcagataattcgttatctgaagaaatcccaccagagctgggaaactgctcaagcatgttatggctgaaccttgcaaacaacaaactctcgggaaaatttccttctgagctaacgagaattggaaggaacgcaagggccacatttgaatcaaataatagaaaccttgggg

SEQ ID NO: 300183 - DNA, 444 bp, Glycine max
  unsure (1)..(444): unsure at all n locations
aactaagcttgccagcgttattatggatctttcaagattatcaaacgcatatgtcctttggcctatagacttctgttgccagcagggtctcgcattcacctggtctttcattgctcactactcaagccatttcttcaagatgttgacaatcaactcgcgccacttccactcccaccaacgaccttggataaccaacctgtgatctcatcgttagctattcttagctcgcgtcaggaaggtccagatgaagacatgtatctccaagttctagtgcagtggaagggtctccacgtagacgacacctcgtgggaggactgggccacattgaagggcacctatcaccttaaggacaaggtgattnttgatgaggttgngaatgatagaccaagcgggtcacaagcagtccataccgagaggcccacaagaaagatcacaacacctcga

SEQ ID NO: 300184 - DNA, 440 bp, Glycine max
  unsure (1)..(440): unsure at all n locations
agaattatacaataacactttttgcccgaccatgtaagccttcttaattatcatgctatcatggaacttcttggtcttttctttgtagaacttggcattctcgtaagcttctaggaggatctcatctaactcactcagttgcaactttctttcctcaccagcttgatccatagagaagttgaaggtcttcactgcccagtatgctttgtgctcaatctccactggaagatgacatgcctttccaaagacaacccgataaggagacattcctatgtgtgctttttaagaagtcctatgtgcccaaagagcatcatcaagcctagtactcaaatctttcctgcttggctacacaatcttctctaaaattctcttgatctccctgttagagatttctgcctgtccattggtttgtgggtggtatggtatggataccctgtgcn

SEQ ID NO: 300185 - DNA, 435 bp, Glycine max
tgaatatatttaatagtacttaacaatacacgggatacttttatacctataagtacgtggcactccctaaaattgccctaatagtgaacaatttgaattatttacctaatatcttaggttcagatttcattaccgtaatattataaaagaaagtaatagtgtaggacttattgttcttcaacttatttatacatatctttctattttaatctcaatttaatcaaatagattttttctttccttgtaatattgatagacgtactttcttacaggaaaattaagtaaaatatttcaaatatgtggtgaacattttctaaaaaagacagataattataggattattactagcactgtatgcaccaaatcacaatctattctgctgaaactaaagaatcagatataatgaactttgtgaaattcttgacagtgtgtact

SEQ ID NO: 300186 - DNA, 379 bp, Glycine max
cacttaaagctcttcgtgcaatgaactctaactatctacgccattaatgcttacattaaatgcatggtcgttcttcatgcagagagatcatgttgatagattaacgtgacaaacacttcagccgaaaagtcacttcttttatcaaacttgatccgcatagtgaaacgccctttgatcaaggtcaacactctcaaattatggacttcatttattattcataagattttgacttgatagataaaagaatctcaaacgcacagtattgaataaaggtcttaaatgcaacacctacatgctatgtcacatcatgtatgtgagagacatcatcttgaactccaaacgatgagatacagatcatgatccggccacacactacact

SEQ ID NO: 300187 - DNA, 435 bp, Glycine max
  unsure (1)..(435): unsure at all n locations
tccatcaagtggtaatcagagcagaagagcttcaagtaggtgctccttaaacctccattaattttttgctttaccttctcttccattattttttcttcattttttctccacgtatctcctcaaatgtcttgtgctaaatgttcttaacatgattctttagagttttcaccgattaaacttgctagagaagctagattttattttctatggttcaaatttcttgttcttgttcttgaaccatgaattgtgttgagtttaagttcctttgagttttgtcttgttattttttgtggctgaaatctaaaccataaaattcttacaaaaatattaaagtagaagaaaacctcaaaaatctagagtgacttgttcacctattgtagttntgtcatagaagtcatgtctagtcatgaaacttgtcacataagatttcttatg

SEQ ID NO: 300188 - DNA, 432 bp, Glycine max
  unsure (1)..(432): unsure at all n locations
ttntaactcttaatattattttttcttataaaactgcaaacaagtgcaattacattccatataagcatatgctctaaataaacagctttttagctcttagtattctaacttgatgcaataaaataattgatgtttgcttttgggtattattcagataatattttttgtaaaaaggttttaaattgaaagaataaaaaatttcatacatgagtataaacaaaagattgttttgtagataaacagagtgatatattacaacttcaacaaaatcattcaaataatatggcctcaattttgatgtgcattaaagaacaaaactacagaaaacttagcacattcaagaagcatagctactttcatatttctgcttgttaatgttccctcttttttttgttccgttattttttatgtcaagcatagattntcccatgt

SEQ ID NO: 300189 - DNA, 444 bp, Glycine max
  unsure (1)..(444): unsure at all n locations
ntataagcgcgggtctgggagacaaaggtcaagtggtcgcgatatgcgaagatgatgttccgagtgcattggatttggtacgaccatgccctcctgatttctagctgggaaattggcgagtggaggaacgccccggcatttacgcaacgagcataatgtaaacctttacggttttaaaagctctatagttaggcctaggctttagagtttttccttttgttaaggctttgtgtcttttgtttttgaatttataatacaaggatctttcttcatctgttcctacgtctctacccattctcattcatttgcatgttaacttctttatttctgaaacggaagatccgatgacgagtcccccgaaggtactaatacctgggacccgcttatcaacttcgagaaagaaacgaatcaaacggaagatgaagggaacgaggatgtgggact

SEQ ID NO: 300190 - DNA, 448 bp, Glycine max
  unsure (1)..(448): unsure at all n locations
tgtagaattcaccccaattccagtgtcctatgctgacttgctcccatatctacttgataattcaatggtagccataaccctagccaaggttcatcaacctccatttctccgagaatacgactcgaacgcaacgtgtgcttgtcacggagaagccccggggcgttccattgagcatggtagggctctaaagcgtaaggtgcaaggtctaattgatgcgggctggctgaaatttgaggagaattgcgtgtaaatcctgacattgacaagagatgccacacatggggcaattttgaaagctgttgttaggtgtccctaatgactcatcagggtttccaagtttatgccattattgtaaaccacagctacaatgttaaatgaaatggataaagttgatatctttgtccctcatcctctcacaaacgcatgtttgcttattcaactntcatcg

SEQ ID NO: 300191 - DNA, 448 bp, Glycine max
cttgcctttgcaattccaagacactagtgagcttccaagtatatgacatgtaccatttgtaattttcctatctaatttgcatcttccaaaatcagagtctgaaaaaccttttaagtttaaggaagttcctttggaataccacaaacctacattggttgtgcccttaagatacttaatgatcctcttaacagtagttaagtgagattcctttggattggactgatatattgcacataatcaaacacttagcatgatatccggtctacttgcagttaggtagagaagtgatccaatcatacctatgtatcttgattcatccactgatttacctttctcatctaagtcaaggtaggttaatgttgtaacgcctttaaatttcaataactgaaaatagatgtttgatgtatttcttgtgttatttgattactgggattaattggatgagttg

SEQ ID NO: 300192 - DNA, 421 bp, Glycine max
tctagaaggagatcaactggatgttctatgcttcttgaaggtggcagtccatgaggaatctccttggaaaagacatctttaaattcctgcaataagggttgaacactaggagaaacataaatagttaactgattagaattatcactctctctcttttgtgtatcactcttttcctcgggtgtatcactcttctttttcatattcctttgtggagcctcactattttctttctcttgttctctcttttctctcattctgatttggtcatcacacacttctctaggtgatagaggtttaagagtaaacaaggaagatttgatcaacaaacgttgcatttgtgtagtccacgcgtccagaaataagcgttgagattcatccagttgatgatatacaccaccattgtcaccagctcttgccatga

SEQ ID NO: 300193 - DNA, 452 bp, Glycine max
  unsure (1)..(452): unsure at all n locations
gaaactcaagcttggtgtagaagggattgctaaaaaatgtaatcggatgtccttgttgtgttagcacagtgcccattcctacacctggtgcatctgtttcgatcatgaagggtaaggcaaagtctggaaaactcagaactagagccttgttgattgcttcctttagttgctcgaaggcattaatggcttttggagtccaagtaaattggtcctttgccaaaagttgtgttaatgatgtagcaatagctgcataccctttaatgaatcgccatgagccatcacttttcttaaccaggagaaccgaagatgagaaagggcttgtgcttggctagattatgccatttcgtaacattgattctacttggttctcaatttcttgcttctggaaatgggggtatcggtatggtagcacattaactggttntgagtttggaaggagatggatcacatga

SEQ ID NO: 300194 - DNA, 437 bp, Glycine max
tattgttaagtttttagtcattaacatgctatctattaaatacactatcaaaagactattttattttaatccaaatatttgtgtcaatttttttaggttattttgtatcaatttcttaaatacgaagtcgtgtcgtgcgcaatctatcaaagtaatcaaattaaacactacaagtcataccaacaatgatggattagtgttttagtattgcataattatataattattaatctgtttcatttcctccaagtcaaaatttcactttataggccaaaatatatatgttctttttatctgtctttcttaaacaatgatgaaaggtctgagaaacattttattgacattgactacttacgcttagaccttggatcaaaacattaaaaaaatgttaagtattgatatacactcgtaccaatatgaggtaagggcccccattt

SEQ ID NO: 300195 - DNA, 438 bp, Glycine max
  unsure (1)..(438): unsure at all n locations
ntagatagcttgttgtaatcgattacgacaaccctgtaatcgattattacagagagttttgcctcttgaagaaacttttctaacttagaaacttttcttcacactaatcatgatgatgcatgatgcaatacaaatatcaaatgtactaagatgcaacaaccaagataacaaccaatacaaatgccactcaagggatttaggcatgtaaaagtgaaaacttcttcaagcttttctttgagcttcaagctttagcctttaagttgttcaccatgttgctccttctatctctaacactgcactccattccatcccaccatgtttgtccttaaccacgaaaaacgactntgttatcctttgtgtagaccaagcaatgaagtacataaaatttgggataaatatacttggacacctagtangagagagagagagagagagaga

SEQ ID NO: 300196 - DNA, 409 bp, Glycine max
  unsure (1)..(409): unsure at all n locations
cctttcattntaacccttagaacttcccagttcaaattgtcatagataaagnaatgttgatgttcaaaggacactttaaatccctttttaatcaattgacctacacttagcaagttttggtcaatgttaggtacataaagaacatctgatattaatttgatacctgaacatgttgaaattgcaacagttccttttccttttactgaaatatagccaccattcccaattctgacctttgagacattanttggcttcaaatccttgaatagagtcttatcatatgtcatgtggtttgtacaaccactatcaatcaaccaactttcacttgattcactactcaagaagcatgtggccacaaacagttgatcctcctcttcttgattagcaatctgagctccctcatcatgat

SEQ ID NO: 300197 - DNA, 429 bp, Glycine max
  unsure (1)..(429): unsure at all n locations
tgtgactcttggcaatttcttttanaaaactagttacttattaagttttgacttttgaaaaaatcttcagaaacaagtcatttgaagaattgtgacttttggaaatgtatttttcaaaatcaatcactggtaatcgattaccattaaggtgtaatcgattacacatcaacaaatgtgactctttattttgaattttgaaaattaaaacatttagaagctctggtaatcgattgcaagtattgtgtaatcaattacataagtttaaaatactttaaaactgtttaaacataagttataactcttgaaatttgaaatcttaacgttttaaaacactggtaatcaattactaccttctggtaatcgattaccagagagtaaaactctttggtaatgaatttgtgaaaacttcttgtgctacttcaatatttg

SEQ ID NO: 300198 - DNA, 422 bp, Glycine max
  unsure (1)..(422): unsure at all n locations
tgtaggccttggatcttcttcatcaatggagtcctttgcttctttaagatgaatggcagcgtaatggagaaggaagaaagatgattggagacgccacttcaaggagaagatgaatcaagaagaaactcaccaccataggaagccatggataagagcttgaaggtaggagaagatgagtggagggagaggagaggcacgaaattttgagcctcaaatgagatctgaactttgaagtataattcttaaatgatcaaagttgaaaatatgcacatacatgacctctatttaaagcttaagtgtcacacaaaattggagggaaatttgaatttctattcaaatttcacttgaatttgaaattgaatttgtggagacaaattttcgagccaaaaattcactaattatgattagtgaattntagctat

SEQ ID NO: 300199 - DNA, 487 bp, Glycine max
  unsure (1)..(487): unsure at all n locations
naagcgacggtggggtttgtttgacccctgcataacgagaactctgaaactcagcttgttgagtaaataccagccccaattttatgtggacctaattgcgcgnggaaggcaggacgtgtgcaatatatgagaaacaattgtccgtttcacttcctaaagatacagagatcgacgatgactaacacccacttctgtgcgggggttctcccatacaggggcgcatcatgtgatctaaaggactacaacggggactattggaatagctaacaggagcgtccaattttcagcctacaacgttgaacgttccatagatagactagagtcatacaccgcattgaaaacgcacacaattaacgtgcgtaacgtagatatgcatgagctaatgtgaacgctctcttaccctttctagaattcaatcgacatagacacctcgtagttcttccatctcatgatgaaaggtaccacaaatagtctcgactttatttcg

SEQ ID NO: 300200 - DNA, 303 bp, Glycine max
agagcagaggcatcaactttaatgttcattttattaacattcggttagcccataaaccgctggcatgttaagacacgcgttataattctgcataaattttacattaatatgccattttgaatatgcgatatatgtgaaaggaacttctaatcacacctgccgttataaaacaatattatttattctgaaggtatagaatggtatgataatcgttgacgtcccactggcgtacttagacccttccttatatattaaagttttacaacgtcccctgaacacaacatcttttatgtatgctcacca

SEQ ID NO: 300201 - DNA, 407 bp, Glycine max
cttgcttgagtgatgatccatgctctcgcccatctatggatcatgtgtctaagaagcttatgagagggatatcacctttagcacaccagctccctatgaatagactctggacaactatctttaaggactaaactaattcacgattttgttgttcttgtttacttatttatacaccttatatcctttatcttttgatgtaagcttgctcgtgttgtcattgtaatacaccatgtataagttactaaaggtcgagagtaactagattgtccggttcatatactatggcgattgtgagaatgaattggcacattatctttattgggaaatgcttggtgtagagtgagcatgcatatgtacaagttagtggtgagaataacatagcagtacaaatgattgacttttaaatt

SEQ ID NO: 300202 - DNA, 448 bp, Glycine max
  unsure (1)..(448): unsure at all n locations
tccttaagaagcttcattgagaagctagagcttagctacacacacccctctaatagctaagctcacctccttgagatgaaaagctagagcttagctacacatacccctctaatagctaagttaacccccatgccaaaatacatgaaaatacaaaaaagtccttactacaaagactactcaaaatgccctgaaatacaaggctaaaaccctatactactagaatggccaaaatacaaggccaaaaagaaggaaaacctattctaatatttacaaagaagagtgaacccaaccttgggacatgggctcagaaatctaccctgaagttcatgagaaccctanggccttctttagccactctagctcaatcctcttggagtcttctatccaatacccttggggggtaggaatgcatcatcaatgctatgcaatgcaatcaatatgcaatatg

SEQ ID NO: 300203 - DNA, 449 bp, Glycine max
taagagcaaaaactacggctactaactcaagatcgtgtgtgggataattcctttcatgtatcttaagctgtcgagaagcataggccactacctgtccccgttgcataagcactccacccaaacccatcttggacgcatcacaatacaccacaaaagattcactcgggttaggtaacactaaaactagtgcagtggttaacctttccttaagggtacggaaactactctcacattgggcatcccacacaaaaacttgacccttacgagtaagcttagtcaaaggtaaggctagcttagaaaaaccctctatgaatctacggtagtatcctgctaagccaagaaagctcctaatctcaaacactgacttaggactctcccaactcatcaccgcctctaccttggaaggatctactggctatccctccttagatataacgtgccctaagaag

SEQ ID NO: 300204 - DNA, 447 bp, Glycine max
tatggggccaaatgctttgcttactgcaggcaacacattgatagctagcatagctcattcacggaaaggccggtggaggaaccgtgtaattacttgttaacaccatatcttaaagagacacagttggtgtatcttgtcttgttgaattgaaaactgtgctatagacacccttaaaaaaggaattgcttgaaatgagcatgacttttttcttttctgcttctggggtgaaaagtctgtatataatatagactttcatagacaattgatttgcggccacagatagaggatttttggaggcttgactggagagatgattcaatttctgaaggaaatcttcagtctcattctgagatgtttctgttagctgatcatagtgtcatagaacccaggaaaattagttgaattttgaagacagagatattgatactccaagaggggtggagaatt

SEQ ID NO: 300205 - DNA, 420 bp, Glycine max
tcacgcttgttatttcatccacatcagactcattgttcaatctctcatcaacaacacccaaaatatatcaataaaggtactgtgccctacaatgctatcaaacaaacaacaccctttaacactgacactagacagtatagtagcacgcagggtgccctagccgaaggccttgcaaggggttgtttgtttggtcactatatacagtcttgtctcttccttaccctaccctacatgtcactaacttcaaaagcccaacaacaaaaagtgagaatgaacacatgaagcttacctcgacaccaacaacgataatggcaacgacctggcagcgagtgggagtgaaaaagaagagtcgtggcgtagagaggaacacctacatgggcaaaatgaaagttgtgacagagacgaagagtcgtgactgac

SEQ ID NO: 300206 - DNA, 428 bp, Glycine max
  unsure (1)..(428): unsure at all n locations
tattgtactattaaaagagtaaataatctagtgtgtcccttggaagtgttaagctttgttactttagtgtctaaaattaagtaaattaattttattttctgaaattgcaatctgtcagtttcaagtgtaacatgtgacttaagtgattaatattaacatttgtttaaggatcaaaatgatactaagtggttaaaattatggagttagttgaaatgactaagaattttgggatttatttaaatttttcttaattttaaggactcgtgtaatagtgctttaacactttcaacactaaaagttaaggtgatttacccgttgtctctaccttagtatacttctatcaaagcatgaatatattacttaatttattataatagcactcaatcattatattatcacccacattttggattcataaaanagaatca

SEQ ID NO: 300207 - DNA, 431 bp, Glycine max
  unsure (1)..(431): unsure at all n locations
ntgtctcatgctttataatattctaactacaatgaatataataagattagtttactataaaatatggatatcagaaagatcggcaataattactataccgcagataggtattcagaatatcatatacctctcatagtatcgggtgcttgccctatccaaaatatacctcttgtagtatcaggtacttagtctagccgaatacttgacaccccttatagtatcagatactcggcctaatcaaatatctgatcccttgttaaatactcggtctaaccaaatatcgaatatgtctaatgttatctttgacaacttattaaagaaagattacctagattaactaataaaaaataattaagggagatatcagttccttaatgataattatacataggagcattacctaattttaatttgatgctgacacggcacct

SEQ ID NO: 300208 - DNA, 436 bp, Glycine max
  unsure (1)..(436): unsure at all n locations
tgtagaatggctagacatgatacatgtcagggtttggtttggttcaaggataaaagggatgccccacattatttccatgacacaaatgcaaaaatgatgatttggaaactttacgcaaaactggtcatgcatgcacctatgcggacactcaagtgtcaaatttttatggtcatgtgatgctagggctcangattcgtttcctctattttaatcaacccaatgtttccaaaatatgttcttttatcaatttgtgcattcatccgagtccatttcgggcgtccggggaaatttcacagcattcacccttcaggtgtagacacattttccaaaaattggttatgatcaatgaactttttcaaagaaaagttggaaatcgtctcttttcaaaagcatgttggtttttcagcttaacaacttattttttcttttttttcta

SEQ ID NO: 300209 - DNA, 429 bp, Glycine max
tcaacattcaatatcgagcgtctcgatatattacgggactctatcagacatccgagcaaaaagttactgtcgtttgaatttgctcagagcttcgataatcaatttctagtgtctcaatatattacgcgactcagtcagacaaccgagtaaaaagttattgtcgtttgaatttgctcagagcttcagtattcaattctgagcatctcgacatattacgggactcaatcatacatccgagtaacaagttattgtcgtttgaatttggtgagagcttcgataatcaatttcgagcgtctcgatatattacgggactcagtcagacatccgagtaaaacgttattgtcgcttgaatttgctcagagcttctgtcttcaatttcgagcgtctcgacatattacgggactcactcagacatccgagtaacaagta

SEQ ID NO: 300210 - DNA, 436 bp, Glycine max
tgtgtattcctgcattctactaatatatggaattgcccattgctttgcctgagaataacaattggttgaccacaacagcgctgggggcggcaacggacaatggtctttcaaataaacctgttgtacatgaacaaacattatatcatgcgctgaccgtgccaaacgaacaagcgaagtcattgcataattgttacactaactatattcaatgtacctgaacaaaatgatttccaaacacgtgaccgacacatatgatgcggtggccagaagagtcaggtggtggttgacttctaagagggaaaaatgtcatgctttgttgttgggacaacgatacaaggattacgttataccgtgaagcaatcacatatcccatgtctgttatatccatccacttgtccacactaacctgaatgaaccaaacatacacatgtaagta

SEQ ID NO: 300211 - DNA, 430 bp, Glycine max
  unsure (1)..(430): unsure at all n locations
tgccacctagctcgccctggcgagctagcccgccttctggaggaacttcctggaaggcccaagtgggcctggttgctatttgcactcccctgtttactaaatacaccctctgcctttttttgctgattctttttccgtaacgttacggaactttacgaattctgtaacgatacttgttttcttttcgtaatgttacggaaccttacggattacgtaatcatcctttttttggcttttggaatgttacggaacctcacggattgtgcaataatgcttccttttgatttccagcatgttacagaacttcacggattgtgcaacaatgctttcttttgacttccggcctgtcacggaacttcacggattgcctaacgataggtgccaagtacctcgaagcggtgaagcanaggttgcatgctatcaaacaatg

SEQ ID NO: 300212 - DNA, 435 bp, Glycine max
cttaattaattgtcttgatataaaatttctacacagactaataatttcaaagtctatacagtcgtattacttttaaatttggatgtaattgtgtgtttaattttctaacccattaaaagagttagaaaacaatgaagaccacaatatcatctttttttatcattattttaaagtactaatttatttcaatacatgtgaaatttttttaaaaattatagtttatacgctatttatttaaaacataatctttatattataatacaaaaatatcactatttcatactcatacaatcagtatgaatataataaacactataatttgtctaattattattatatatatcattattatataacaataacatttacaatagtcgtattctattactattagactcaaataaaaatcaaaatctcaactatattatttattga

SEQ ID NO: 300213 - DNA, 359 bp, Glycine max
agcttgatgtttctttaacatttatccctatagaatggttactttgggttggtgagttcgctgtttcgcaggcttttgacataatcttggctcctggtcggtgggttggtgagttggtgacttgctatgctcgtgagttcctgagttggtgtgttctccagctggtgagtttgttgttaaaactgctggttttgtttactgcaatgattgttattggtgcaccattttcttgtttgctgagtgccattgttttgttttagggtataagaaaaccagacgtactttgcattggatttttgctttgaacaatggttttgataaccctaaacactaaccctagactttgttgtctcactcct

SEQ ID NO: 300214 - DNA, 52 bp, Glycine max
  unsure (1)..(52): unsure at all n locations
nttgttctaaatattcataacccccacgagacaacacgtggggggtgggggg

SEQ ID NO: 300215 - DNA, 157 bp, Glycine max
  unsure (1)..(157): unsure at all n locations
ctgcctcctatatcgactcttgtctctctatgaggaggttgctgggcctcgataaccagctactaacaacaattcacatntatatattttattcaactaactgagattagatagactctttatttgaagaacacatttagagtgtggttggatgaga

SEQ ID NO: 300216 - DNA, 374 bp, Glycine max
aatccatgtcccatgcgagattgtcaatattgtcaaaattaaacgatttctgtactgaggcaagcccagcaatattctttaattaatattaaatgatatttgtattttaggaacagttgaagaatataaatgtaaagaaaaatttggccatcattacttgatttcagctcatatgagatacatcattaaaaatttcagacctgttcgaataaataacttaattaagtgtttattatattagtgtttggataaacaggatttagagtctggttagatatatagtcagtttcatttatatcgaagaagtcacttattcaagccatcatcacacgtaacgtgcatgttcaaataaatacttattcacgctctgatct

SEQ ID NO: 300217 - DNA, 389 bp, Glycine max
agctttcttatgaagattcctaaagaatctagagcttagctacacatacctctctaatagctaagctcacctccttgagatgagaagctagaacttagctacacacccccaataatagctaagctcatccccatgacaaataacatgaaaattcaaaaaaaagtccttactacaaagactactaaaaatgccccgaaatacaaggctaaaaccctatactactagaatggtcaaataaaggcccaaccgaaggataaacctattctaatatttacaaagataagccggctcatacttagcccatgggctcgaaatctaccctaaggctcatgagaaccctagggccttcccttggatctctagcccaatctacttggagtcttctacca

SEQ ID NO: 300218 - DNA, 447 bp, Glycine max
  unsure (1)..(447): unsure at all n locations
ctaagcttgccaattaacctgatattgagagataatgattattaaacacactaaatgaaaatactaagtatttattacctatacttaacaaaaaatacttataacattacaaaataaccataaattgggagagtttgatacaatttatacaagttttatacacaaaagttaatcgttttcaccgactaacagttcattacatcacgtcaggatacaactgaaaataaataacaagtgcatcagtgattcttaattatgtgagtcatcagttcgaccatatgctggcaataatcgaagagactatgaacttcatcgggagtagagtacatatcatccatcatcttggctcttagctagcagttcaggagttcttgactctcatttagcgtgagcacaaacctattcatccacttcatgctntcctgatgcagtagctctatcactttc

SEQ ID NO: 300219 - DNA, 411 bp, Glycine max
  unsure (1)..(411): unsure at all n locations
agcttatgcatattaatatatttctctaatcaatcatgctcttgtgttctatgttgtagcctacattactaaacctcgatccctcgtcagactgaatcaatccaagcttcgtcctcagatctctcttgttggactaggcccaattgagacagccctcttaggtttagactaacttacactgagttntgtccgcagatccctcttgtaagactagactcagctcaagcagcttacgaaagtttagcctaatttagcctaagcttcatccgcagatccctcttataagactaagcctagactaaacaacattattgtaacaacataattaanaccaaaacttaatccgcagatccctcttgtaagactaagctntgatcctgcttcaatcaagttctatggcaacagtacatt

SEQ ID NO: 300220 - DNA, 461 bp, Glycine max
  unsure (1)..(461): unsure at all n locations
agaggatgcttcaatggaggaaaataaagagggagagaatgtataggggggagcacgaaattgaaggaataaaagaggtagagaagtggaactttgaagtatgtctcacaagactctcattcatcaaagtgaccacaagtgttgaacatgcttctatttatagactaggtagcttccttgagaagctttcttgagaaaacttccttgagaagcttctttgagaaaacttccttgagaagctagagcttagctacatacacccctctaataactaagctcacctccttgagaagcttccttgagaagattcctatagaagctagagcttagctgcacacacctctctaatagctaagctcacctccttgagatgagaagctagagcttagctacacacccnctataatagctaagttcacccgcattccaaaaatacatgaaatatacaaaaaagtccctac

SEQ ID NO: 300221 - DNA, 262 bp, Glycine max
tgttcccttgtctttgtttgaaactcactacaagccctaaatgataaaccatgatatcacccatatcgcttaacgggaattttggagcttttgaatcgttctgggaataagtgtgggggcgttttgtttcattggataacctgctttgttggctatgcttcatgatgtattttgggccatacttgatgtacattgatattggtaaatgtggacatgctgatgaaatgtgcttctcaatgctatagacaaaaaaaaaaattcc

SEQ ID NO: 300222 - DNA, 336 bp, Glycine max
acaattgcatcacctctcaatgagctggggaagaacaatgaggcatttacctgcggtgaaaaacaagagcagtcctttgctttgctcaaagaaaagcttactaaggcacctgttctagctcttcctgactgttctaaactttagagctaaaatgtgatgcctctggagtgggagttggagctgtattgttacaaggtgggcactctattgcttattctaatgaaagactccatagtgcccccctcaactacaccacctatgataaagagcattatgccttataaaagccctgcaaacatgggaacattaccttgctttcaaagaatgtgtcattca

SEQ ID NO: 300223 - DNA, 312 bp, Glycine max
atcttgtataatggctagacatgatacatgtcagggcttggtttggttcaacgataaaacggatgccccacattatttccatgacacaaatgcaaaaaatgatgatttggaaactttatgcaaaactggtcatgcatgcgcctatgcggacgctcaagtgtcaaattttatggtcatgtgatgctagggctcacgattcatttcctctattttaaatcaacccaatgtttccaaaatatgttcttttatcgatttgtgcattcctccaagtccacttctggcgtgcggagaaaatttcacagcattcaccct

SEQ ID NO: 300224 - DNA, 285 bp, Glycine max
  unsure (1)..(285): unsure at all n locations
tgtttacacgcggagatntacgtcatcttccgtactcacaagatctgtcatactcacatttgagtcacgctgaccggcggaaatacccgagtggttagccgtataaacattcttcttgctatctgtaagacgaaaagcctgatagcatgcgaagactgacatcgtcttctgcgcccttcgtcaatcgcggccgacaagcccattgacacgcggagatttacgtcatcttcggcgctcacaagatctgtcatactgacatttgagtcacgctgactggcggagata

SEQ ID NO: 300225 - DNA, 398 bp, Glycine max
agtcttgtagcaaatgcaaaccacaataaattatagctcggatatcccattgagtcccgtaatatatcaagacgctcaaaattgagtacagaagctcttagcaaattaaaacgacaataactttctacacagatgtccgattgggtcacgtaatatatcgactcgctcgaaactgaataccgaagctgagagcaaattcaaacgacaatgacttttacctcggatatcccattgagtcccctaatatatcgagacgttcgaaattgaatacagaaactgtgagaaaattctaacgacaataactttttactcggatgttcgattgagtcccgtaatatatcgagacgctcaagatttataacggaagctcgtagcagattcaaacgacaataactttg

SEQ ID NO: 300226 - DNA, 340 bp, Glycine max
tgagatgaagaagagttgaacggttatacttcccgcttctattcgttgaccacagagtggtacctggagatatgtcgtgggggtcaagagaccttgtggacgtgaggtgttgtgctattgcccaaaaccaagcttgaccaatcaccgaccaacccggtcatagtctgtctgtgtgaacctgtgatgtacctaaacaggcgatctcctgccagtctatagatgaaacgaactaataccacaaatcaaggatgctagtgtggtggctggccagctgtgaactttgattgatatgtggagtatggcctctggtaatcgattaccaagggtgtctaatcgatta

SEQ ID NO: 300227 - DNA, 264 bp, Glycine max
atcactcgtcccgggatccttatagtcactgcaggcagaagcttttttatcgatgcctgatgcgtatatgtcttctatagctcatgggaaagccaaattctcgacaacactttgtgcacttctgtaactaaaccttcacaaggagacataggcaaccctggaactctgccaagccaatgccaaggtttatcacaatgttggaattaaaatcagtagcaccaaaaacaaacctcaaaagctacttatggggcattttacatacaa

SEQ ID NO: 300228 - DNA, 444 bp, Glycine max
tcacatgctcaacaagctccacttcctaaacaacttggacttggtcaacatgccattagagggaagttgatgcatgatcattagtgtaatctgtaattagatcgcaattagatgataataggaggctgagggagttagttagcaataccacgtgtcattaggtagtggctctaaagaattgattattctgttacgtttttctattgggaagtttgctaagaggtagctagtaacaacttgttatatatagcaagttgatgtgaatgctcatttttacatctgaattcccaatactcttttaattcttcgtattcttcattctataatcaataatattatagactctctctgattgggattctcttcttcatttctagttcttccatttgatcctaaatcctagaactatatcaacttggatcagaattgcaccttccatattca

SEQ ID NO: 300229 - DNA, 164 bp, Glycine max
tttctttttctcagcttaagcataagcttttgaagaaacttatctcattttataacagaagctaatccaaacaggacctacattcaaattcatttaaacctgaccacacaccacaataactctcccaacattatttcactagttgaattcaccaaacaaaacca

SEQ ID NO: 300230 - DNA, 345 bp, Glycine max
ttgatctcaacattaaatgtagaccttatgatggctcaagcttgttatcatgagatactttacacacagatttgctcatcataatatgataatgcaaatagatgctgattttaacatttgtattgatttgcatctaatcaaaataatcaagagtcctgatttgttttaagacataaatgtctttagacttgacaacacattaagaatcaacaaatatacagagtcaatgcacatgcatcatccaccttcaacacacaaaatcattctcctcaatcaccatatagactataacattatatgtatgttgaccccatggaaaaccataacaaagtaccccaagttccc

SEQ ID NO: 300231 - DNA, 259 bp, Glycine max
ttgctttgaagaaatgtgatatgaaccttacacacattcattatattcctttatgtgaaaagctctatgtagagtttacaacagctctcaaaacactttgattatcttgagagaatggactaaaagacgagactatatatcctgatgtgcgacactcaaatagttagtcgttgcgcaacaccaacaacaaatcaatcttatctgtatataatcgataacaatttggtacgacaaataatattgggctacatcgaacttg

SEQ ID NO: 300232 - DNA, 302 bp, Glycine max
cgtctaccataatatttgggatgactaaaattcatgattactatataatgtcgaactggtggcggagtgtgagacattgccagaaatcatgaaaagacatgtagttgcatgaaattatgcgtctatcttgatataacaatatacatatgaataggtgtgactctctgaaaagattaaatctttacattaccagacatgacatagtttagaaacataaccaatttacatgcagaataacacatttatatatacttcacccatccctttcattcgaatcgcttcctttctctcttatgcataaa

SEQ ID NO: 300233 - DNA, 388 bp, Glycine max
  unsure (1)..(388): unsure at all n locations
agcttttacaaaacactgtggccatctttgtctttagaagctaaagattttgtcaaacgcatattgaataaggatccacagaatcgaatatctgctgctcaggctctaagtgagttatttttcttgcctctatcatcaatttcaataatatctagtaagacattnttcaagttgtcagccataatcttgtgcttgcaggtcatccttggatacaaaattgcaataatgtaaaagttccacttgataaattgtcagccataatcttatgcttcctgttggaatgaagtattcctactttattccaacccttgtgtttgaaaatgatatataatcttctgaccacaagtattttcgatttatttctctcttgtaaacctctgagaattga

SEQ ID NO: 300234 - DNA, 442 bp, Glycine max
  unsure (1)..(442): unsure at all n locations
ntagtcaaggaaagtaacccanatatgaccaagatgagagtgttgaaagagcctaacaagactntcctaaattcggttaaagattcaatctttggtgatgataatgcttatganacggtaaggaagttagcaaatgggcctaatagatatgttataacttggcaaggatacgatatcaacaagtattcattctacacgaaatcataagatggcaagagtacaatgcanaacagtggggttagtccaagggctgaatctcaacactttgttactgtacatgatgacaatccttgtctagctcacatgccttactttggagtcattgaagaaatttgggagcttaattatctaaaattcattgtctgtgttnttaagtgtaagtgggttgatagcaatatcaatgtgcanatcgatgatattggatttactttggtagatctga

SEQ ID NO: 300235 - DNA, 374 bp, Glycine max
  unsure (1)..(374): unsure at all n locations
agcttggagttatgagctctctctctctaagntatagatccactcctcccccttatttgcttgcagatgccattgggggtaactctgctgctgcggctttagttctttttcatttttatgtgccaaaaaaagagtctctaacttacattacttccattgattcatagttttgtttggcccttttttccttaatttttttaaactttaatgtgacttgttggataatatatggagtagagtttggatttagccttgtgtcatctaaagagtgtgttattgcggcgttcaatatgcacgttccacttcgacgcttccattntcacgacagtaacgtagaagtaacaatctgttaggttaaaaatattttgtaaata

SEQ ID NO: 300236 - DNA, 316 bp, Glycine max
  unsure (1)..(316): unsure at all n locations
cggtcatctctagagtcttggtggtcatctccaaagtttgtgtggtcatggtggataggttcatggtgaggtggtatacaacctcttcagggcggtttaagatggctnggtagctatagtgaatgggtatggttgaaggtaggggttttggcaggtagaggcagccatggacagcangtcgaaccaagttgttaggaatagaggactagctaacgacactaacctatatttgatcattcttctctgattcttatttccttcctagggtatatntatagtgatcatacaacggataaggcttgcattcatgacccat

SEQ ID NO: 300237 - DNA, 403 bp, Glycine max
agcttcttctattgtcaatcacccagcaagccttggcacgagagtgtagcaatgaatgtgttgatgaactactagatggatctgtgaggatcttggatatctgtagtacaattaaagattgcctactgcaacacaaggaaagagtgcatgaacttgagtcagctattcgcaggagaagagatgccgaggccggattcacagtttcgagtggaaaatacttggcatctacgaagcaggtgaaaaaagcaattcggaaggccttatgaaatttgaaaggattcaagaatgaactcatatttgcttcctcaaacaaagacaacgagacattgtccatgcttagcttcttaaaagaatcagaactagtcaccgtgagctcattaaaagccttcttggtgttatcact

SEQ ID NO: 300238 - DNA, 429 bp, Glycine max
  unsure (1)..(429): unsure at all n locations
tatgcgctatattgcatcccaacagctcaggtccaagagctacatctttggcgatatctttcttattgactccagctntggtcatcaagaatatgacctataatacaaatattcaaatttcagcaaaagagtcaattgatgcctctagatgagccagtttattgacatataattattgtaattaatatgtctatgcagcaattaattctacatgaaggacaacttagtaggcacttgatgcacaaattcccgtttatgactcatgctttctagatgtggttngaagtgtatgaaagtatgaggttggttactgataaatacaattntatcactgcacaagattacattcaaattgatntaatgccccaataatttatctggtgtcctganaaaatatgaagactcattttttttctctcttttcaatat

SEQ ID NO: 300239 - DNA, 399 bp, Glycine max
  unsure (1)..(399): unsure at all n locations
agctttatgttttattaaaaacttattaagcttaatagagcaagtatttaagctctataaaagccttttaattttcttcattcaagtatttggcttgtatactatagaagtattcagccataccgaatatccaaaaataccctcaatacctttaagaatttaaagcaaacctcttaaaaagtattcaggtatccggctaggccaaatacttgaatgcttaaaatccttaggcctataaagcctctcaaaagtattcaggtatttgactacgtcgaatacctgagcactcagaatcattaggcttataaagcctctcacaagtattcaagtatatggtaagctgaatacctaaactcttagactccttagctctatanaggccctaaaaatattcatgga

SEQ ID NO: 300240 - DNA, 431 bp, Glycine max
  unsure (1)..(431): unsure at all n locations
gtgtatggtttccttgagccacagtctatactccacgcanaggacagacttgaagaatgtcaataatacattgaaacgtgggccaagtaatcacattgacaagtgtacttaggaccttacttgaatcagtaagtgaaattgatgtcattattgtgaaaaagtttgcattataagttctttaattacattcttttacttcaagacacatngacaacttcttgttatgtgtccacgggacaatattgttgtttgattctcttctttacgtaaaaagcctgatgttcacatcaaggttgcaattaacaggttattggtaaaattataacaaatntattgtttaccaagtgtagtatagcaacaaagtatctttcgttatatacgtttttgttattgtggaaactagtgcaatgaagaaattatccagtaagttg

SEQ ID NO: 300241 - DNA, 400 bp, Glycine max
  unsure (1)..(400): unsure at all n locations
agcttttcatttcaacaacaaggatattaagaggaaaaaagcaagacaacttagaagtggaactctgtcaaattcattggacgatatactttgcacttaaatagttcatcctttgcctagcaaagttaatttgtttatttgagcttatttgttattcactttattgagtgtgtgttctttgatatttcagtttgcatcagactntggcctctctgattaagtatttaacaatacaaaggaaatgaattagtcaaagaaaaaaatggaaaaaggttactcttccaataaatttcccttgttcacagggattaaatatgaatactagaaagacagaatgattgtgcattttgaatccatgcaaattgacatgtgggatgttgtgcaaaatggacatcatatt

SEQ ID NO: 300242 - DNA, 233 bp, Glycine max
taccttttactgtagtgaagctcactacccgccttagctgaataaccatgatatcaccatatacttacggaacattgccactgtcgaatagcgctggcaataagagcgatgcggccatgctttcgtagtattactgatcacatggctatgctcatcatgtatgcagcgcctgctacatctgaaatgatatctatctgccaacatcgtgaatttatcttacttctttaatgtct

SEQ ID NO: 300243 - DNA, 237 bp, Glycine max
agctttttgtagttatacatgggaccaactcatttaattccaaaaaggaagtcttatctagtcaaggcctgagagaccatacaagtttcctaccaatttctaataatgtgggccattaagtctatcatatgctgacaatacccgagaagcccatgaatctcttcgggggcggagtaggtgtctgccatcgccttggccttggctaacaatcggggaagttcttgactcccgtcaagg

SEQ ID NO: 300244 - DNA, 464 bp, Glycine max
  unsure (1)..(464): unsure at all n locations
agagcccgggtagtcaaaaagaagttcaagtccatagccatcaaagtctgaagagagtatgatgaactaagggacgtaaatatggccaccgatgaagccttggaatgagaaaccaagaaggcccgaaaggaagaacacgaccaaaacaagttttgaggggctttatagggcagcaatagtgagctcaaactccgaagaggtgaaaggaatcatcacgggtcaaaggcatgatctggaaggacgagctaaaggcttgccttangtcgaaaagaaatttgtcccaacagttaaggtgagaatgaagggaatatgtgggccatcatcgatgagtgcaaagagaagctaaatctagcggcgactcacgagcaaaggctagaggatgagtacgccaagatatcagcagaaagggaagcaagggaaagggtaattgattcattgcaccaagaggcagcaatgaggatgga

SEQ ID NO: 300245 - DNA, 269 bp, Glycine max
  unsure (1)..(269): unsure at all n locations
agctgagcgcgcttcaaagtctgaagcacaactgaaagttataatctggctcatatctattgacttangtgattagctctcccattattcaatgtgaacttttaaatatcttcaggaacgatatcatttacgacttaaagcgctagatgagagtttgagaggaaattctaacagtattaatcgctgtaccccagagggaacaagtatgagcaacagcccttctcagcgtcatccctacgcggagctgataactactcagaactaacctc

SEQ ID NO: 300246 - DNA, 348 bp, Glycine max
  unsure (1)..(348): unsure at all n locations
ntntggagtagaaacatgggaccatctcattgtattttcaaaattataagtcgtatctagtcaaggtctgagagaccatacaagtttcctaacgatttctaattatgtgggccattaagtctatcatatgctgacaatagccgagaagcccatgaatctcttcgggggcggagtaggtgtctgccatcgccttggccttggctaacaagcagggaagttcttgactcccgttcaggtaagagcaaaccgatccatccacatggttgcctcttggtgtaaagagtcgatcaccctttctctagcctcttttttcgcgtatacttgagcatactcgtccgcgatcctatg

SEQ ID NO: 300247 - DNA, 332 bp, Glycine max
tgtttttccttagctcgcccagacgagcaaggttgcttctggaggaatcttctggagggcccaattgggcctggatgctatttgcacccctatgtttactaaatacacccccttgccctttgttggtgattcttttttcgtaaagatactgaaactgacggattgcgcaacgatacttgtattctttgcgtaacgtcgcaaaaccttgcggattgcgtaatcatgcactttgttgacttacgaaatgtcacggaacctcactaattgtgcaacgatgcttacgttcgatttgcggtgtgtcacggaaccttactgattgtgcatcaatacct

SEQ ID NO: 300248 - DNA, 440 bp, Glycine max
  unsure (1)..(440): unsure at all n locations
gacactatgatactcagctanagtatgcccgagtcattcatccctatgagatgttgtcgatgtattggcaatcagaattgccattccttggattatagggttgaaccaagctcatgcttttacanaaaggttcatcaagtcaagttgaaatatggaaagaaccgtcctgcaaaattggggcaaaagatgaattgagtcacatcactgcttcgtctactgccaaacatatntaggattgtagatgtccttggtacttccagtttcaccttgacaaagatgtcatggaccatgttgaaaatctaaattgattcaaccccatatcctgcgtaaaaattcccaatacttcgactgtacatcattcgcatgcatncattgctttcattggntgcattgctcattgcattctttcttttgaaaataaataaaataaatgaactatc

SEQ ID NO: 300249 - DNA, 289 bp, Glycine max
tgacgaagttatgttccttaaaagccttggtacaaaagaaacctctaactaagctattatgaaggtcaataacctatatcctataaaacataatactatacctgactctcgtaaaacttaattaggctaattccatctttatatcatgttttgagtagcaacaattctgaatttatagactatagtctattttacatagaattatactcaatggcctataatactattatcccatgtcgagagaaagtagatctatattaacatttaatataaaactagcttggaaccc

SEQ ID NO: 300250 - DNA, 433 bp, Glycine max
tacacaacatccatgcataacaacattcacacagcacaagctatttcagccaagctaaacagagcataggcagaaaactctgccaaaacaccaaccaatagtcacagcttttaccactcaaagaccccagtaacaattccttcgttccaattcgttaaccgttggatcgactccaaaattttactggaagtctatagtgtataagcctgcattttgaccgctgggatatactagcaaacatccagaactcattctgcactaaactttccacagccaaccacacacaagcatttttctgcacttgtgcaaaattctgctgcacaatttcacagcaaaaactctgcataagtgcagatttcgaaaatcacccttcctctcatccaatcttgccaaatcaaatctacaagtcccacatatgtataaacatgtctaa

SEQ ID NO: 300251 - DNA, 363 bp, Glycine max
  unsure (1)..(363): unsure at all n locations
tatatangtactagcacgcagtatttcattgacatataacacctttattgactatttgctcccacttatcttgcggtatacacaatcatcaactatatttgcctaaagatcatatgaagtaatgacatgatggaacttgttgtagcgttgtctggagacttgattcagaccatagatgtgctaatttagaatgcaaaccatacactttgaatgacctgatacaaaggtttagggttgcatcatataaatgggttcttcaatgtcacaacttataaatgcgagcttaacatccatatgatgtagctctaaatcataatgagctacgagtgccattattgttctaaaagaatactttaaagatat

SEQ ID NO: 300252 - DNA, 375 bp, Glycine max
  unsure (1)..(375): unsure at all n locations
ttgcttttatccaaaatcttgactcaccataaaccttgacccagagtgagaatgtcaatccttaccctctgaagcacaaaaagaagagaatgaatatttccaatcaaacgataaaggagaaggaaaatttccaatcaaagaggaagcaaaaaaatgaaagaatgaaaatttccaatctaaggaaatagagaggaaaggaaattcccaatcaaagagtgggagaatgcacatagaagagaaagaanattgccaatcaaagaatgggagaaagaaaaaaagagaacgataagattgacagagagctcatgatcaatgatcgaaagagaacaaaagacatgtgcagagatgtctttggaccacacaatatctgaacaa

SEQ ID NO: 300253 - DNA, 303 bp, Glycine max
  unsure (1)..(303): unsure at all n locations
ctcagctgaattggttttacatgatgatacatgatttttacttgatgatttgatcgggcaagattggatgaggggaagtgtggttttcgaaatctgcattntgtgcagatntttgctgtgaaattgtgcagcaggattttgcacaagtgcagaaaaatactangcatttgctggttgtggaaagagcagtgcagaatgagttctggatgtttgctagtagatcccaacggtcaaaatgtatgcttatgtactagagacttccagtagaaatttggagtcgatccaacggctaacgaattggaa

SEQ ID NO: 300254 - DNA, 320 bp, Glycine max
  unsure (1)..(320): unsure at all n locations
agcttgtatgattatggggtacccatcacctgtggtactatgtggcggtcgggcgatggtgcacaacaagttttccacatccacaaatcacgtataaacccaccatcccctgttgccctcctccaactgagctcacgtactcccacgtagcccatatcctcgttcctctcaacgccgggtccccatcaatcctcccaagcttccccaacatccaggtaattcaacatccactcatcacanactaacaaaccaagcaaaacagagcanaggcagaaaactctgcccaaaacccaaaccaaaatcacagctctttctcactt

SEQ ID NO: 300255 - DNA, 420 bp, Glycine max
  unsure (1)..(420): unsure at all n locations
nttaatggaagtcaagagcatgatattgcgccgataccgttcactggtgagcaggtatatcagcgggttcaacacctgaacactgtatttgggaagacccataagaaggataaaagtcagagttgcatatggaagaagaggtccattttctttgatcttccgtactggtgtgatcttgacgttagacattgtattgatgttatgcatgtggagaaaaatgtttgtgacagtgtgattgggacgctccttaacattcaaggcaagacgaaggatggcttanatacccgtcaagatctagctgatatgggtataagagcacagttgtatccaaggtctgatgggaagaaatattacttgcccctagcctgccatactntgtccaagaaggagaagataagttnttgtcagtgtcttcgtcgg

SEQ ID NO: 300256 - DNA, 328 bp, Glycine max
  unsure (1)..(328): unsure at all n locations
agcttgtagatttatcccaattccagggtcctatgctgacttgctcccatatctacttgataattcaatggtagccataaccctagccaaggttcatcaacctccatttctccgagaatacgactcgaacgcaacgtgtgcttgtcacggagaagccccggggcgttccattgagcatggtaaggctctgaagcgtaaagtgcaaggtctaattgatgcaggctggctgaaatttgacgagaattgcgtgtaaatcctgacattgacaagagatgccacacatggggcaattntgaaagctgttgttaggtgtccctaatgactcatc

SEQ ID NO: 300257 - DNA, 179 bp, Glycine max
  unsure (1)..(179): unsure at all n locations
atggaatgagcctacacacttatgcttgagtgaaacaatgactgcgatgatngattgatgatacttacttgatctctggcattcttactagcttatttgatacgtgactctgatgcggatgctacaatcgttgaaaatctgcatgcttgtataaagcagtggattgaagcagtccatga

SEQ ID NO: 300258 - DNA, 311 bp, Glycine max
agcttgtgcttgttttatttaaattcctaggatcatgagcaactatgtgtgtcctactatgacttgagaaacaaagggtgatcaaataacaagcagaaatttaaagggtactaggttgcctcctattagcgcttctttaacgtcttgagctggacgcgtgatgacttgttgatcacagacctagtacttttgcatacctttggctttggacttggtcacctactggtcggcgatgggtcgtacgcaacgctccagcctttgtagatgagctgacgggctctggatgtggcggcggtgcatctattacctac

SEQ ID NO: 300259 - DNA, 416 bp, Glycine max
  unsure (1)..(416): unsure at all n locations
catcaaagtaatacaacattcaaacagcacanactatcacagccaagaaaacagagtttaggcagaaaactctgccaaaacaccaaccaaaatcacagctnttctcacttaaagaccccagtaacaattccttcgttccaattcgttaaccgttggatcgactccaaatttttactggaagtctctagtacaaaagcctacantttgaccgttgggatctactagcaaacatccagaactcattctgcactgctctttccacaaccagcaaatgcctagtatttttctgcacttgtgcaaaatcctgctgcacaatntcacagcaaaaatctgcacaaaatgcagatttcgaaaccacacttccctcatncaatctgcccaaatcaaatctacaagtccaaatcatgatcaatcat

SEQ ID NO: 300260 - DNA, 393 bp, Glycine max
  unsure (1)..(393): unsure at all n locations
agctttgaaatttggcatctgaagtctgagagctttgggcagataagtctgctaaagctggaggtcgagttgaagtagaagatgcaaaaatgccagctattggtgtaaaggaatgaggaatatcagcttctctgagcttagtcttctttgtctctggaaaattaactgtttggtcatttgcattccaacaattccttatgatataagctaagtcaatggctggtcttaggttttcataggaggtaagggcatcagatcccactcccctcgatctacanaaggctgtgattaaagctgggaagcctaatcgagaaaagttagactgagcgatcatggtcatttgtctatacatcaaaccaccgatgttcatgtccatccttgtgaatatgccat

SEQ ID NO: 300261 - DNA, 440 bp, Glycine max
  unsure (1)..(440): unsure at all n locations
tgttaagctacaacttgggcctaagcccaagaaatgtactcagctcagcagagacctcactagctcatgagcacaaacatatagctgaagtcctatgaaggaacatagatttgttcgcctggcagccatctaacatgccgagaatccaccccagcattgtatgccaaaaattggttgtctgcccttaggccaaacaaatctcacaaaagaaaaggaagatgggagaagaactacgtaaaacaattaggggagagatcgacaagctactcaattcccaattcatcagagaagtcaaatactcgacttgttaggctaacattgtcatggtgaggaaggctaatggaaaatggcacatgtgcacaaaatacaccaacctgaacaaagcgtatcccanaggcgtgtatcccttacctagcatcgacaagctagtggacgatgcg

SEQ ID NO: 300262 - DNA, 397 bp, Glycine max
agtaacaataaacctgtcatggcaattccattcaagacaaaagatgtcaacgaggaaataacctctaaagacattaagagcctaatggaacaggcaaattataccaacaaatacttacaagctttaggagaaaccataaaaactaaggtagttcctaaacaaaaatcaattgaggaaacttcgccaagaatccccattgaaaaacctttattcaaacctttcaaagttagtgagaaggctaaaagaaaaattagggaacttagaaaaactaaatccttaattgaaggcgtaggtgacaaccatagtgaattactaaacaagattggtagtttacttaaagtcattccagataccccccaagcctcggaaaatacttccaaaatggtaacaagaagta

SEQ ID NO: 300263 - DNA, 444 bp, Glycine max
  unsure (1)..(444): unsure at all n locations
gcttcttcttcctgttgtaacatttgtagaacttccttcagatttttagctaagacctcctttgatgtcgatcctgctaaaaatgctgccagatgagacttttggttcaaaaacacagaagtctctggatcagctgctttgaggacttctggatgggattggaaccatagttttacttgttctggatccgctttggatgagtcaaattgtgtccaccattttacaaatgcgtgtctttgtagtgatggatattggtttgtcttttcagtcttgctgtaacgatattgccatgagaatatccatgacagtgcaaagcttgaaaagtatttaagatctgctggaattcgtgattcctgcgaattgtattgtttcttanattgngaaaatccttgttggaccgtttctgggaatatctctgggattggccanagaatcccaccattg

SEQ ID NO: 300264 - DNA, 430 bp, Glycine max
  unsure (1)..(430): unsure at all n locations
agctttgatccaatacaaacgacaataactnttttctcggatgtctgattgattcccgtaacatatcgagacgctngaaattgaaagctgaagctctgagccaatacaaacgaccataactttgtactcggatgtctgattgagtcccgtaacatatcgagacactcgaaattgaatgttgaagctgtgagccaattcaaacgataataacttttttcacggatgtctgattgagtcccgtaacatatcgagacgctcaaaattgaatgttgaacctctgagccaattcaaacgacaataactttttactctgatgtctgaatgagtcccgtaacatatcgagacgctcgaaattgaatgttgaacctctgagccaatcaaacgacaataactntttactcggatgtcatgattgatgtccgaacatatc

SEQ ID NO: 300265 - DNA, 426 bp, Glycine max
  unsure (1)..(426): unsure at all n locations
cttaacattcaatttcgagcgtctcgatatattacgggacacaatttaacatccgaganaaaagttattgtcgtttgaatatgctcagaggttcaacattcaatttcgagcgtcttgatatattacgggactcaatcagacatccgagtaaatagttattgtcgtttgaaatggctcagagcttcaacaatcaatttcgagcgtctggatatattacgggactcaatcagacatccgagtaaaaagttattgtcgtttgaattggctcagagattcaacattcaatttcgagcgtatccatatattacgggactcaatcagacatccgagtaaaaagttattgtcgtttgaactagttcagagcttcaacattcaatttcgagcgtctcgatatattacgggactcaatcagacatccgagtaaaa

SEQ ID NO: 300266 - DNA, 169 bp, Glycine max
aggtgaaacttcctgcttttattgttgaccacagagtggtacctggagatatgtcgcgggggtcaggagaccttggggacgtcaagtggggtgctattgcccaaaaccaaacttgaccaatcccgacccaacccgggcatagtcggtcagtgagaacatgtgacgtacc

SEQ ID NO: 300267 - DNA, 320 bp, Glycine max
  unsure (1)..(320): unsure at all n locations
tatgcgccatatttcctacgaacgttcacttgcacaagacatcctataactaagaaaaatgcacccatatacaatcaaggtagcttcattacctagattatttacatgtacttccaaggtgtatttggtatttacatcacacacngcctcttggctaaatttacatacatgcatacctcaagcatttcggggtaccaaaaattgcacatgcgctcatcttggtatttctaatacctatacatatacaaacttcatgatgaatcttgactacctacgcaataaggtgctacatttcatgcntctttttttttttttttttt

SEQ ID NO: 300268 - DNA, 233 bp, Glycine max
agctttttattcaataacgagcgtcgagatatatcacatgactcaatcctacatccgactgaaatgctacatggcgatcaaatttgcttggctctccaacattatacttcgagcgtctcgatatattactggactatatcatacatccgactcaatagtagctgtcgatgacatagcttagacattcaacatccatcttctagtgactcgttatattactgggctcagataga

SEQ ID NO: 300269 - DNA, 389 bp, Glycine max
atcaacaagagtcttcacaaataaccatcatgaaacagaaaactatcagaactacccgtcatatctcccacaaccccatacccacgaaaatcaaaggagaaagaagcccacccaaacctgaaatttcgaagtcccactcgtagccacgcacttcacgactccaaaaacgctctcctttcgcgatttggggcataaatgatggccagaggttgaagctttgcttggagcttcaatggagaatgagggagaaagaaacgcaacgtgagggagatggagagagaatgcttctgcaatctttctgctgaatgaacagagagagagtcgctttttggttcttaaacggctttctcctcttttcttattattttattcaagctatgccacatgtc

SEQ ID NO: 300270 - DNA, 379 bp, Glycine max
  unsure (1)..(379): unsure at all n locations
tatattgactacttagaataatactttctataccatttattctttttttataccgctaatttattaaaccccttctcatgtaggttttgactctctttatttgttattatattgttgattgatatgaaacatttattgattttatcaatgattaatcttggtagaataatttgttagacatctttgatgaaatcctctctctaccatattctttacatttagaaagttcaagattgtatttaagaaaatcgagctaaatactactcaaattaatgatttgtcaagatgattgttataaatctatcantaaataacttaatagctgaaaatagctaggcactggcaagatctccgtgttcttgtattacctttattttgc

SEQ ID NO: 300271 - DNA, 399 bp, Glycine max
  unsure (1)..(399): unsure at all n locations
agcttatctgtcacttttagcacttcatgacttagcctctttttcacctgaaattgcacatatttcataattaaatccaatggacatattctagagacaactttaacaataaaacaagatttatttacacaatcactacaaaataaccataaattgggggaactatacaagttttggaaaatggtttctatataaaagttattcgtataagacgactaacaaactcccccaaatttatagttttgcttgtcctccagcaaagaaagaacagttcacttgtcctcaagtgacaaactatagtgatcacttcaaatggtgtttgcttcacaaataaattcaaccatatgaactcgatatcatggactgcttcaatcaattgattntcacaaacatgcagct

SEQ ID NO: 300272 - DNA, 402 bp, Glycine max
  unsure (1)..(402): unsure at all n locations
tgcttgtggngcttctatggaggctggatctttgagcttcaatgtggtcctttaatggtgattttccaccatggagatgcagtgtaagacaaatgagaagaagtgagaggaggcgccatccactatggaataagccatggaagaaagagtttcaccaccaagatgagccttggataagatgcttggagatgatgcttcaatggaggaaaagatagatggagagaaagagagaggtggggagcacgaaattgaacgaagaaaaaagggagagaagttgaactttgagttgtgtctcacaagactctcattcatcaaagttacaacaagtggtacacatgcttctatttatagactatgtagcttccttgagaagcttctttgagaaaacttncttgagaagct

SEQ ID NO: 300273 - DNA, 284 bp, Glycine max
agcatattgagacgcttgaaattgaaagctgaaactctgagacaccacgacacaccattacttcttactcagatgtacgattgagtaccggaacatatctagacactcgaaattgaatggtgaaactgtgaacccattcaaacgataataactattttcaccgatggctgattgaggaccggaacatatcgagacgctcaaaaatgaatggtgaacctctgagcacaatcagacgaccataactctttactcggatgtctgattgagtcccgtaacatatcgag

SEQ ID NO: 300274 - DNA, 222 bp, Glycine max
tagctttgtatatcattgacacagaattcttgggctttcttccaaaaagaacgacatgatttaaatgatctcaggatctccaagatatccggctcaactgattgtcataacacggcacacaattgatagtcaagcttctcccattcaggtcttttatcatctgagacagaattagatgatatctccaaccagtcatggtgtccttgaccaatgaaccacaac

SEQ ID NO: 300275 - DNA, 410 bp, Glycine max
  unsure (1)..(410): unsure at all n locations
tctaaatatccgaatcatgatattatnggacggccttatgcataatgtgtctagttatgcatatntgccaagtgtgtggtgaattattattattaaccattatattggtataaaattggttctactaanaaatggtgacaattcttcattggaaaccttaaatgcatataagatgagtatttttcttttacatatgacttattctatacatangtgcgatcatcatttagatgcctaaaatatgtattctttgattgcactaacaattcagatactagcggtgttattacatgatcactgattttgctaacacataagcgttacgagtgtccataatataggatcaaacaaacttcacttttgagaagaaagcaaattttttataggactaaatcaaatttgtgatttat

SEQ ID NO: 300276 - DNA, 314 bp, Glycine max
  unsure (1)..(314): unsure at all n locations
agcttttgtccttgngacctactcacctcgatggcattaaccgccccccctccatgattggcaagcgggtttgtttttatgttgggcccgtcctcttgaaaagtcaaccactcggcctctatcaagctttggaccttacttttcaaggccaagcactgttcgatcgagtggcccggggttcccccatggtatgcgcaggtcgcgctagggttataccactttgggaacggngactggaagatctttcccgggaccaccatggccaattggttggcaatgagagatggcaagagttccccatatgtcattggggt

SEQ ID NO: 300277 - DNA, 441 bp, Glycine max
  unsure (1)..(441): unsure at all n locations
ntggatctaattgatatcttgcacacatgcatacactaaacatattatntggcctacttgtagataaataaagtagagatccaatcatacctctgtattgctgtggatcaacaggttgaccggattcatctttgtctagatagcaacttctattcataggagtagccaagtgttttgagttttccattccaaacctcttaataagttcttttcaatactttgcatgattgacaaagatcccatcatttgtttgtttgatttgtagtccaagacagtaatttaattcacccatcaaggacatctcacactcactttgcatatcaatagacaactccttgcacaaagatgcattagtagatccaaaaattatatcatcaacataaatntgtaccaacaagatatcattatctctcttttatatgaataaggtggcatctactt

SEQ ID NO: 300278 - DNA, 414 bp, Glycine max
  unsure (1)..(414): unsure at all n locations
gcttgcaagtatggctctcttttggacctctattcttattgacttcttgaactcaattctggattaagacatgtttcatagttttattttccatggcttaaagtcttaaacgaataatatattgtgattaaaatgtggctccccagcggtgggcctgacaaagtaaatgtaaacctagtttcatatgttattccgtanggtagtgcttcctgcacnttcttttttttcttttggaatgtaaaattacattctggaatacactctctttagcttcctgaataactatttcggaaagttaaaaaacattcttggaaagaatgcagtaagcaacatgggagtngtagaataacctattctaaacacttgaacagaatgtgtatgcacatccctagttcacctacatgatatgttatc

SEQ ID NO: 300279 - DNA, 454 bp, Glycine max
  unsure (1)..(454): unsure at all n locations
tgaacctcacagacccaattccaattatcttttacaggacttgttgtttccatggaggactgaaccaccaacttgtttgtcaagatcctcaaaccaagacttgtttggagtcatatgaaatgaacacccagagtccaagatctatttgtctcagtgttcttatgagacaccattaaagcctcagctgaatcataaccatcttcaactagagtagcatttccaggttctttagatcgatcttgcttggttcctttctgtctattangacagaatcttcgagtatggccttctcttttacagtggtaacatctaatgtttagtacattagatccaaatcgagtttgtgacttggatcttttcccttctgtcttatcatccttcttgtattngcttccacgaactangagtccttccccatgtagagaaggcctttgtcatttctttcatttaactc

SEQ ID NO: 300280 - DNA, 191 bp, Glycine max
tcatgctataacagtgaagaaattatccatggattatgtaaacgggggaaacacatactttgaatttactttacgctggcgtgtggaagcactcactcctgtcatattctatgctgacataccatttatcatcttactcttattgaaaaattagtaccgacgattctattgctcatactctgagccagcct

SEQ ID NO: 300281 - DNA, 468 bp, Glycine max
  unsure (1)..(468): unsure at all n locations
agcttcacaatatgaanatcgatcatttgatgaagccttcacattgcatttcttcaacaccttttccatatcttaattgttggggtgtccaagctttctatgccaattctccttgactgacatgtaggtacatgggtctatattgacttgagagttgacacttgaaagttggtataatccatctctaagattcccttttagtagtgccttccctgtcagtttgtccttcacatagcagtagtttgcatcaaattcaacaagagcattattgtctgcagttaatttagatacactcaacaagttcttggttatttctgggacatacaagacattacgcaagttgaggttattcaattgagtcgagcctgatgccaatatgctcaatcttttaccattgccaactaacaaagaattcttaccattgctttcactgagatcttggagttctcattntgatgagtcacatga

SEQ ID NO: 300282 - DNA, 404 bp, Glycine max
agcttgtatgattatggggtacccatcacatgtggtactaggtggcggtcgggcgatggtgcacaacaagttttccacatccacaatgcgcgcataaacccaccatcccctgttgcccacctccaactgagctcacgtactctcacgtagcccatatcctcgtttctctcaacaccgggtccccatcaatcctctcaagcttccacaacatccaagcaaaacaacattcacacagcacatgctatcacaaccaagcaaaacagagcataggcagaaaactctgccaaaacaccaaccaataatcacagcttttcccactcaaagaccccagtaacaattccttcgatccaattcgttaaccgttggatcgactccaaaatttactggaagtctctagtacataa

SEQ ID NO: 300283 - DNA, 462 bp, Glycine max
  unsure (1)..(462): unsure at all n locations
tggtaagaaaagagcaacacacacagtcatctaataagtatcaagtatttaaaaaaaaaactgtaagtataaaatagaagtgtgtgtgctgctatttaagaaaaagacaagctaagtgcggaaaggcaagtaatagagttggaataaaaataaaaaggttgatctatgtatgaatgctctcttagaacctaagcttttgcatcctagaaaaaccatgaattgattgcagcccagcctcgttacaagcctagtaaagtccttcagattcaatttgtgtgttcttgactatatggcatgagatgaattgcaaagattaagacttgtgttagttgttgattgttgaataagcctaaacacttgtgtttgagtgaaacagtagctgtgtgaccttggttaatgatccttccttgatatctnttgctcttactagcttatttcagttgtgttccttaataatcatgt

SEQ ID NO: 300284 - DNA, 378 bp, Glycine max
  unsure (1)..(378): unsure at all n locations
agcttatgaagcatcaatagaccttaagaaaatagtccatttaggacaataaacaagaaaattaatgagagttctcctagggtgatcagtccacccatcagccatcatagtacatctagtttccttccaaacttcttggtaaattttaacaagcttcctcccttcatcaaaccatttatataacaaaggaccacaaattctataaaaaaaaaatggagatttatacaccggactcatgctactaataacatcaatcataggttgataatatgtcgagttaattgcattaaatggcactatagcatctatcatccattntgcaatggctttgtcacacttttctacaattttcttattgtgcaagacactcttcaagct

SEQ ID NO: 300285 - DNA, 445 bp, Glycine max
  unsure (1)..(445): unsure at all n locations
ctataaatagggggagaagtgaagtagaaaatggttcagccccttaggcacttctctctctttcgaatttgcttaggaaaattgtttccgtgaagaaaatccaagccgaggcgcttccgtaacgtttccgtgagtgatttcgtgaaggttttcgaccgttcttcgacgttcttcattcgttcttcatcgttcttcagtcttcaacgggtaagtacctcaaaccaagcttttcgattcattctatgtacccgtggtggtccacattttgtttcatgtatttttattctcgtttcatttattttttatacccccttttgacgtgcttaagccattntatttaagtcatttctcgcttaacctanaaataaaataaatttccaccgatcgtttgaattgtattatccattaactttggttgaaatgaatntcgaccgatcggtcatgc

SEQ ID NO: 300286 - DNA, 467 bp, Glycine max
  unsure (1)..(467): unsure at all n locations
gatgacntggtcttcaccgacgaaaggatcaaagtgagtctattaagaggcaaatttgatcatcatactttgataaatgccaaaaaaaaactagggcaaatgaagagggtgagaatgagggacaagcccatgctgtgactgccattcctatacagctaagtttcccaccaacccaacaatgtcattactcagccaataacaaaccttctccttacccaccgcccagttatccacaaaggccatccctaaaatcaaccacaaagcctacctactgcacttccaatgacaaacaccacctttagcgtaaaccataacaccaaccaagaaatgaattttgcagcgagaaagccttagaattcaccccaattccagtgtcctatgctgacttgctcccatatctacttgataattcaatggtagccataaccccaaccaaggttcatcaacctccatttctccgagaatac

SEQ ID NO: 300287 - DNA, 350 bp, Glycine max
  unsure (1)..(350): unsure at all n locations
gcttgtgaatttatgatcgagtcgttgaggagcatgttagttagagaggccgtgatgataagcattatgtgaatgattttgtggacattgtgcttgccattcaggccacagatntccagaatgatcaaacattctggaagaagtttgatcatggcaagatctatcttcatattgtttctacctatgtatgcatattgatgatctcttagcttattgtttatcaagtgttagaaatatattctctcgtactcattgtttaacactattctttattagttacaattcggatagattctaatactagttaagggtgaggaccatcacatcataagtgggcacacttatcttct

SEQ ID NO: 300288 - DNA, 439 bp, Glycine max
  unsure (1)..(439): unsure at all n locations
acgtgacctatgaaactcagcttatacctcctccgatgtcaatgatgtttacaccacctccaattatgctttcagcaccaattcaaatgatcttcctagatgtactatctcataggataaaccaaccaaattacaagagcttcatatccacactatggttgccctgctgccaacattcggagaagtaaaatatgagatatacttgtcttttggttatagtagattctcactaattggtataatttggatagaattgtaatgattgatgcactgttacaatgtttattcttatacattggtagaatgtttactttggaaaatatntattgcgacaacattangtaataaccaaaataagtctcattctttggtaggattaacttaatgattntacattcttgttcgagtctcgtattctgagtaaagtactgtcacatca

SEQ ID NO: 300289 - DNA, 399 bp, Glycine max
  unsure (1)..(399): unsure at all n locations
agcttggttacctccttcttcactacatcaagaatcaccgggttgagtcttctctgtggctgtcttactggtttaaccccatcctctaaatttattcaatgcatacatgtggatgggctaatacctggaatgtccgccagggtctagcctatagcctttttatgcttcttgagaatagataacagtttctcctcttgctcatccgcaagggaggcagatataattattggaaaacttttgctatcatccaagtaagcataatttaaatntgatggtagaggcttcaattctggtgtgggtggctggataatggtagaaagagatggtttctcagcctgtaccttataaagaaagtcagaggtatgtgtacttnctganacanntggtagtctatctaac

SEQ ID NO: 300290 - DNA, 405 bp, Glycine max
  unsure (1)..(405): unsure at all n locations
tggctcaaaatttcaaaaactccatattgcatataacatttagtgattatagcataaagacaatgattgtgataaaaagaaccataatgagttatatagggtgtttacttttataccattaagctttgaaaggttcccttgcatcattatggaggccaataaaaaattaaataaattatttaaccttccatgtgaagatatcaaaccctcaaactaatccannatttctctcatttttcttttgtaaaatttgacatangaagggaatgccaaaccaagtccctaatttcttcaattatgggaaaaaagaaagcatatctaggtggatagaacaaaanatcaatgtatatgaatcaattaatcacagaacaagaaataaaaataaaaaaatatcanaacaaatat

SEQ ID NO: 300291 - DNA, 381 bp, Glycine max
  unsure (1)..(381): unsure at all n locations
tgtagtcaaaccacgattaataataataaatcacagaaaagaataaggatggataaaggaagaaaaggagaaaatgactatagaagaaggagggtttcccctattagagatgttcaggctttgagtgtattcaataaagagctatgagtctcactgcatttttctcctttgcttcctattccttttataggccaaaaatatcttaaaatttatgcgacctcgcgttaagtgcacccttctgagcttagtaagtatgacggtgtgatcatgcactgagcacgacagcgtctgggcttattgagtatggcggcaatagctcgcttagcgcgggattcgtgctaaacacgcctttgggctcctatcgggatcttntatgtaata

SEQ ID NO: 300292 - DNA, 381 bp, Glycine max
  unsure (1)..(381): unsure at all n locations
tattacataaaagatccacgaaggagcccaaaggcgtgtttagcacgaatcccgcgctaagcgagctattgccgccatactcaataagcccagacgctgtcgtgctcagtgcatgatcacaccgtcatacctactaagctcagaagggtgcacttaacgcgaggtcgcataaattntaagctatttttggcctataaaaggaataggaagcaaaggagaaaaatgcagtgagactcatagctctttattgaatacactcaaagcctgaacatctctaataggggaaaccctccttcttctatagtcattntctccttttcttcctttatccatccttattcttttctgtgatttattattattaatcgtggtttgactacc

SEQ ID NO: 300293 - DNA, 446 bp, Glycine max
  unsure (1)..(446): unsure at all n locations
tgnggaagaatgtggatacctctggaatattctagagatgcgtgatatctttcttgtaccttatggacagatatggaagagtgtacaaactcctagaatgtgtggagcattctacagaattaatcttcaccttatgatacaagaaatctccaccatttattggggagatggagtagtataaataagggtaagaaccttcattcctatccatccctgataagagtgaatccacttcttatagtgagaaaaagcctctctgagagagaagatatatagcttgggaagtctttattctcaagcttgagtgagccaccgtagagtgagtccatccatgtagagagcctctctgagagagaagataaataacttgagatgtttctatcctcaagcttgagtaagcctctctgagagagaagatatatagctcgagaagtctctatcctcaa

SEQ ID NO: 300294 - DNA, 291 bp, Glycine max
ttcacttttctgcgtggaaaatataatttagttttaaaatccagaaacgcgcataagatataatctggattatgttatgtgaataccgagttgtgaattatgaataatccggttttttttttttaggaaaagaatttataatatgaattctgtctgatattaattgtgatataaatcattaaatcccttataaccaaggtagccataccatattaaggaattggcaaataaccgagtgccacaaataattctgattacatgtcaattttatgtgatatcattaatcatatt

SEQ ID NO: 300295 - DNA, 418 bp, Glycine max
tccacttgtatattattgcaaacataataaaagctttctgtttttccctcccatggatgtagccttactcaaggtgaaccacgtaaatctgtttgtgtgttctttctctcatctctttctctttcaatttttttacaacatcgtgtgtgtgacataactttcttctgcatctgttgttgttgtttttgcttgttcttcatcacttccacaacaatctggaatcaagagctcaatttgcgatcaagggaattcaagattctcgtctgaatataaagatcaagctgtgggagtcttgtttctggttctttcgctgcttctttgtgatcaagaacattcaagaaatcatgtccaacacaatcaggattgagaaattcaatggaaagaacagcttcaatctgtggcgcatcaagatgcatgc

SEQ ID NO: 300296 - DNA, 345 bp, Glycine max
  unsure (1)..(345): unsure at all n locations
tatcttgtttgcaaactggatgcgttggtcaacttggtaacccagctggctttgaataagaaatctgtacctgtcgcaagggtttgtggtttgtgctcctctgctgaccaccatacagacctttgcccttccatgcagcaacctggagcaattgagcagcctgaagcttatgctgcaaatatttacaatagacctcctcaacctcagcagcaaaatcaaccacagcagagcaattatgacctttccagcaacagatacaaccctggatggaggaatcaccctaccctcagatggtccagccctcaacaacaacaacagcagcctgctcctttccttcanaatgct

SEQ ID NO: 300297 - DNA, 390 bp, Glycine max
  unsure (1)..(390): unsure at all n locations
tggatcattaagactcattgagaagataaaatctctgattcatttcttgaaagagtgtggtgaaatctttatcttaatgaacaacacctcgtgctcaagagttcatcatttccaagccaaatgcacatttatacttttaaatatagtctttntattccttaaccagtatccttatgatcaatgaggatgaggcaaacgagtgagggttgaaagaaatccatgcatgttatgccagctcctgttcctcattggatgctctctgttccatttcgactgtcggctttgtcactagcaccgaattctatcattctgtgtgactgacagatcttttgttgtgtgttggtctgatggccacaatacaatacttctattaatcagcaattgaaatat

SEQ ID NO: 300298 - DNA, 396 bp, Glycine max
  unsure (1)..(396): unsure at all n locations
agctttcttatctgnnttaagtccaagcccataaataaaataaaatctagataagatctacataaaataatatctagatgtgataaaatctagatatgataagataaaatctagatgaaatacaatttagataagataagatttggtagaataaaattgtctgctctcttcaagtccaagcccaattccggattcaagcccaattacttacaattctcctgacattaaattaaacacacacaattaatccagtaggcccaaatgataaaactacataattaatttgacaattaatgctaatcaataattacaatggtgacaaaaagggttaagacatatgagaaaatgatgacacatcagtgaggcacatgaccatccagaatatgcaatttcagc

SEQ ID NO: 300299 - DNA, 440 bp, Glycine max
  unsure (1)..(440): unsure at all n locations
tcagaccaaggcaattcataatctaggtacctaaaacccatcaatttagtgggatttcaagggttgagaagtgaaaatgagaatggngtaattttggagtaaactctcatctcaaacaagtctataacattaatntaaacttactcaaactggttttacggcgaaaactccaccgattcaaaatttgacccttcaacacccaatttaccctagaaatggctcttgctttcacatttgtcactcattnttctcatttgctctgcccaagctntcctacaagtcctaattgacattntanactaggatcaactcactttagactccaatttacactaaccccaaatntagcttctctaaccctcaaaatctcacactgttctacctacaacattgtcattctcacatntagccctaaattaactgtccccatcatctctacc

SEQ ID NO: 300300 - DNA, 409 bp, Glycine max
  unsure (1)..(409): unsure at all n locations
agcttatttatcattgataaaatatcaacaaaatcttntattataatataatacaacttatcaaaacaagagttcgtttttttacatgtaatagaatttaaatgaaaaaaatgaaagcaattacaaaaagtagtaaagtacaacaaaagtgaaatttcttctttaaaaaaagaacctaaattcatcgtgtcacaactcttaagttaaggtgttaagaaataaatttgtccaatggctttaaacttcttaaatttcctcttgaaagagtagaaataaaatgttcaatcattttaagttaaatcanatttaaaacaatattacatgaattcaaaatagtttgaccaaattgattaagctgaanaaactgattacctttcccaaatanataacaatggttatgaaaatgata

SEQ ID NO: 300301 - DNA, 464 bp, Glycine max
  unsure (1)..(464): unsure at all n locations
tgaaattatcatgcaacgctacgaacgccaacaacttttgttccncaccattgcttactttgatggccgctcttaaggttcttaccatgggaagaaattcaccctctctcataaggcctccttcaactgcaataacctatttgctcatgacaacaatcaaggtgccaaatgctccatgcctgtgtgccaatattgtgttacacggtgtcacatgatatgttaggaaaaccactcatggctaagttcaagacatgattggccaagcaatgaagtcctttgccgaatgccaacggtaagagaatgagcaattgtgcctctctttgcaaaatgccataaacacaattctccaaccttggtgtcgtacttgtacagaacatccaacangctcaaataacaatgcttggagttgatgctgcacctgcccctacacttgcacttgtactttaaccactcttcatacctac

SEQ ID NO: 300302 - DNA, 329 bp, Glycine max
tcgactctgcgtgcatgcaagcttttccactattgtgctatcaataggggaagacgtgaggaagagacggttcaccccatgatgcacttctctctctatccaatgtgctacggaccattatgtccatgaggaaactccaagccgacgcgcttacgcaacgttgacgtgagtaattacgtgaagattctcgagcgttcttcaaagattgatcgctcgctcttcgttcaatacgatggtcaattcattatatgcatccgaggtgctccacatggaggggcatgcatgatcatcctctttatcagatactctttataccctctattgacatg

SEQ ID NO: 300303 - DNA, 450 bp, Glycine max
  unsure (1)..(450): unsure at all n locations
acacatacacacacaacacacatatttatatgctctaatatgcttttacacataactcataatcatgtatttacttcttctatcttattatgattatgttttaccttagtcaaaatttaaagagggagattgttaggtctaaatggtccacagaccactggatgacccattcccaccttggattttgatgattataaaggtataaattattggtagactaatgatttattgttaagtgaacatgacctactacataaatgagcacacttggtattaaattgtattctacagctctagtgagtatgcatccaacgggctattaaagtacctgcatccacttattgtgaaactagtgttcacacactgagttgtttttattcgtgttcattggacttanatcacttatacactctattttatatctttataagtgatgtccaatgaagtaca

SEQ ID NO: 300304 - DNA, 410 bp, Glycine max
agcttgttgtttgaagtctaatccatcacaaaacacaaaatacacatgaagaacaaattaaatgcatacagtcatcaaatcatagaaatcaattctaagaacataaaaaatggctaaattaccaaacacaaaccatcaattcatgacaacaagaaaaagtattttaaggtaattacaactcgtctaatcaaattaaaaacaattataataaatcaaaatgtaaactacacaattaacttgagatctaagatcaaccctattactcacaaccaaacatccattataaatcattatctaatccctaacgttaccaatataaccaagatggggaaaaggcgaaaataatcaatatcatatagtaaaagagaatggaaaggtagggaacactcatctaacaaacacatagataa

SEQ ID NO: 300305 - DNA, 422 bp, Glycine max
  unsure (1)..(422): unsure at all n locations
gtgtctntntcctttattcttcatgtcatgattgaatgattcattatgtctttccttctcccttctttnttggtccataacaatgattatacaactcgtcattttctctctatgctttgattgaatttcatacacaattattttattaatccaaaccatataaattattacgtgtgtgtaatataaaagcatatttagtaaaaaatattgtttatatgaggataaaataataaatgttgatatttaaattacataagtacataaagctaatgaacacatgtcttttaaatctaatgctagatatacattgcatgataatgccatatatagtggttagtcatgtcttaacttatatatatggattggataaacagaataattggatatgaatacgaataagagcataagacgaggaggatgaa

SEQ ID NO: 300306 - DNA, 436 bp, Glycine max
ggagttggtccttaacgtggtattgaaacttagcaatttggtggtggagctgcattgtagcaacaaggattagacttctgaccacttggtgacaaaggctctcaagccaagttaagaaccaactcttctttaaattcaagctattaggtgtagttgaatggttttatatttttaacaaaagttgtactttatttgcagttgaatggcttccatgtaagcttgtacccttgaatattaagagagattatctaataggcatgatttttttaatattattcagttattcaataatgactgtaattttcatatgcttgattcttttcttaattattgtaattatttatgttttaatattttctttagatgtcaaaggagttgtgacaactatatcttccattagagattccattacagagtatttcagggtggaaaatca

SEQ ID NO: 300307 - DNA, 114 bp, Glycine max
aggccaaagctgaccaaacccgggcaggggagaaatgacatccctacgaccgtgtacacacaaacgtgcggaacagaaaaagaaaaagggggaacataaaaagaacacggacaa

SEQ ID NO: 300308 - DNA, 98 bp, Glycine max
ttctttttgttgcgcaacccaccatccttggatgagacactgccgataatgtgtccaccatcacgattgtcttctgccttctcattatcggaggtacc

SEQ ID NO: 300309 - DNA, 375 bp, Glycine max
atacaacgtagtgactgggaataccctggcgacacccaacttaatcgccttgcatgacataccactctcgcaactggcgaatagctaagatgcccgcaccgatcgcccttacaaacagttgcgcagtctgaatggcgaatggcgcctgatgccgtattttctccttacgcatctgtgcggtatttcacaccgcatatggtgcactctcaagacaatctgatctgatgccgcatatttaagccagccccgatacccgccaacacccgctgacgcgaacccattgaagccgtattaaatataaatcgacaatatgtatgtattaggatgttctatcgataaccccgtatttcgtagccctgcaatgatactagagct

SEQ ID NO: 300310 - DNA, 325 bp, Glycine max
aagataggaacgggtatgaccacacccgtccgtgaagaattaatggccctgccaaaaaactaccaagacatctttgccttgtcataccaagatatgcccggtttgagttctgacatcgtacaacacagattacctctaaatcccgagtgttccccggtaaaacaaaagctgaggaggatgaagcccgagacgttcttcacaataaataaaagagggtaagaaacaatttgacgctggctttctggctgttgctcggtactcggaatgggttgccaacattgtacccagtcccaagaaggatgggaaggtatgaatgtgcgtggat

SEQ ID NO: 300311 - DNA, 445 bp, Glycine max
  unsure (1)..(445): unsure at all n locations
nttgttccttttataaaaagagaagttctgaaactcatcacgttgtctaaaaaagccttgaggtggatccaagtgctctgatcattcattagcatattcatgagttgccccaaccaaacatagtccgccacgtcccgtctccatccgcacccgttaaggaactcgttccctttacaaaagacaagggaaagattgatctacttgaagagaggctaagagcggtagaaggcctcggcaactattcgttcttggatttagcggatctgtgtttggtacctgacatcatcattccccccaagtttaaagtaccagaatttgataaatataaagggacgacgtgtccaataagtcatcttcggatgtactgccgaaggatgggggcatattctacggacgaataagctgtaatgcacttttttcaagacagcttagctggaacagcagt

SEQ ID NO: 300312 - DNA, 433 bp, Glycine max
  unsure (1)..(433): unsure at all n locations
ngagttgaggaagtgtagaagggtttaacttcttgctnttattctttgaccacagagtggtacctggagatatgtcgcggnggtgaggagaccttgaggacgtcaggtggggtgctattgcccaaaaccaagcttgaccaatcccgacccaacccgggcatagtcggtcagtgagaacctgtgatgtacctaaacaggcgagctcctggcagtcaacagataaaaggaacaaagaccacaaagcaaggaggcttgtggtggctggccagctgtgaaacttgattgatatgtgagatatggtctctggtaatcgactaccaagggtgggtaatcgattacaaggcttaaaaatgaagacaggacgctaagatggtctctggtaatcgattaccaaggggtgtaatcgattaccangcttgaaaacgaagtcaag

SEQ ID NO: 300313 - DNA, 164 bp, Glycine max
ttttttatcctcattggctctcacagtctttagatttgggagccaatccaatccttgtgtctggactctcagccacttatgatagccgccgatgatcccattactgtttcccctaagctctctgtcctttcttcatgccgcatcccatgccttgcgaactcctt

SEQ ID NO: 300314 - DNA, 374 bp, Glycine max
  unsure (1)..(374): unsure at all n locations
tggtaatcaattaanacaaagagttttatgtgctaaagaagtttctaactttagaaacaatcttatttcttctacatgatgatgcatggtgtacatatgaaaatatagagactaagattcaacaatcaatacaacaatcaatacaaatgtcactcaaagagttggtcatgtgaaagacaaaacttcttcaagcttcttcatgttgctcctcctatctcttacaccttattcttctatcttatctttgacacttcttttttgtacattataataactgaaagtccaatgaccttgattatatatactttttttaatgaaatagtgaaatacggtgagacactatccttttatttctgaggtaacttctctacact

SEQ ID NO: 300315 - DNA, 411 bp, Glycine max
  unsure (1)..(411): unsure at all n locations
nggatattaattgtatgatatatactattgaacgctcgctacaacatataattctactctttcagtgaatggagcagcattcaactaggcttgtctgttatccatttacaaactgtagttagaacttaattcataatgataaggtgctactngtctatattgcaaaactaatcttctgaagcgggtttggttcatgcgtacgaaatatgagaaataagacaggatggaaagatcatcgatctaggagctttcttcatattatgtgtccaatggatgcatactgaattgtattagcctcttgaatgatgatatattgtcatttactatacgcagtgacgatgttnctggagtttcaacagaatctatgcagctctcatttgatgcccgatggaatagtgtacctacaatact

SEQ ID NO: 300316 - DNA, 449 bp, Glycine max
acgagtgacacgttgaaacgtgaacgttgaaacggagcctaaacccactgtgacctggtgccctcttttatggccccggtttttgaaaaccaaatcctctcacggatgaccaacttaagcctggacgagtccttgtgatttcatgtgtgtgcatgctctttattgcttatgagaaggaaaatacagttgaattgggtgaggcatgactgtgacttgatctcacccatagcaattggtggtggagtgacagacatgtccatgtgataccccctaccccttcattttactactacggactaaagacattcatattcatcaaagttctttcaaccactcctcgcaggataaaggctcacacttatttctttacatactctactctgccaatcaatataatcatttcaatcgacacggcgctagctcctaccataacaagaacgatccacggc

SEQ ID NO: 300317 - DNA, 293 bp, Glycine max
agcttttgtttattgtgatgaggtacaagccctaaaggcagagcttgaaagagcccgagtagtcgaagagaagttcaagtccatagccatcaaagtttgaaaagagtatgatgaactaagggacgtcaatatggccaccggtgaagccttggaacgagaaaccaagaaggcccgaaggaagaacacgtgcaagcaaagttttgaggtgctctataaggcagccatagtaagctcaagctccgaagaggtgaaaggaatcatcacgggtcaaaggcatgatcttgaaggacgag

SEQ ID NO: 300318 - DNA, 463 bp, Glycine max
  unsure (1)..(463): unsure at all n locations
taatcttttacaaaggaccatgacttacgcctaggaatctattttntggttntgaatgtataaaggcttgaatattacgacatgtttgagaggtttttgattagaatttaaattggctgcctcatgatgaataccttgcacctaggtagcatggaaaatacctttcaatggtatgtatatatgtgaatatatatagcatggaaatgccttgcagagtgtataaatatatggcataaatataccttgcaaagtgtgaatatatagcaaataatgcatttcaaaaatctatatatgtaaaaaatgcgtttcaaaatatgtatgtttgtaagtaggtatgcattatttccaactaatttctaatgccatctactatttgcaggggttgcgcccacaagacacctagtggacccggagaagtccaacatggcccttggtgtttcagctctagttacgggcctctatc

SEQ ID NO: 300319 - DNA, 368 bp, Glycine max
  unsure (1)..(368): unsure at all n locations
agcttatactcactgagctcttgattgacacaagccttagggtgatgcaatcctactcccaaagggcattggatagaagactccaagaagattgagccagagatgcatgagaaggccctagggttcttatgagccttagggtagattttgggcccatggactcagtatgagcccacttatctttgtatatattagattaaggtttcattatttttgggccttgtatttagggctccatagtgtaaggagggtaccctagtaatgtaggatttttcagcccttgtattttagggtacatagactagttattggattaggggtaattntgtaatttctcatgcattaagtgcactatntgatgtgtgtgt

SEQ ID NO: 300320 - DNA, 466 bp, Glycine max
  unsure (1)..(466): unsure at all n locations
tgataaagtccttagtgatctattntatgtttgtgcaattaaattgattagatgatgcacaaatttgagatttgtaatttcaattagtttgaatgatagacacagcggaaacgcttgtgtgctgagtgaaacactagccttgtgaggagtgaagcatggttaatcttcttgaatacttgttgtcataccctaatttcgtctggtgaccattatttgttggtatgcgaccttcgcttgaccatctcaaaatgtttatcacccatcgttgtgtaatccataaagtctcgcaacattccggaagtcaaaacaagcattgttgcgcaatccgtaaagtttcgcaacattccggaagtcaaagagagcattgttgcataatctgtaaagtcccgaaacattcaagagggcaaaaagagtatcattgcgtaatctgtacagttacgtgatatttcggaaagaaatcgatata

SEQ ID NO: 300321 - DNA, 406 bp, Glycine max
  unsure (1)..(406): unsure at all n locations
agcctttcatttaagtattctaagataaattagatataatacaaatttggtaacacacatgaagttctgtgacacaagggacagtggaggataaaacggtgagcacgataaagtataggaagagtatcaccttaaactatctatctctggtgccatggcttcatcaagtgtctttgaggaatggcttggcatcccatatccagcttggatatntcttacatctggatgggtaggaggaggagtaaatattggagctgcatcttgggaacgcttacgaaaaactactccagatccgctgcatttatataatccaacacaagatattatgatacgatctcatggtcattgaatattaactcaccatgtgaatatgggatacagatatcgatgcaatcttctatcctgt

SEQ ID NO: 300322 - DNA, 427 bp, Glycine max
taatgaatttatatcgataataattcaatattatatatagttgcagctattttagaagtttaaataatatataggagaataatataaaagtttagtacaccgtattcaatcataaataattatttatgataaatttattaatttctataataattaacttaaaaattatattaataataattcttatattgatgattatgtaaacttttgcgcaaataatacatgtatattaaactcattctgaaatcttaaggattaattaattgattctagtaatactatcacactgctgacaagttggagtaacaatggtgaaatttcaagacaaaagtttgattaattaaaattaaagggagataatttacgcatagagacctatgcttaagaattatgatcaatagtaattcctacattattcgtattgaat

SEQ ID NO: 300323 - DNA, 232 bp, Glycine max
tgcatgaatctctgaattatggaatgaatgcatgaatttaaggatgatgaatgccattgttgattataaatagccacttagcccaaaatctaaccatgtgcatgaatgatttatcccttgcactcagcttgagctgaatgaatgtttgattgattgaaccttgagcctgcataagttatcttctgctaccttgtcttaagttgacgagagcatgattcatagaaagatttgg

SEQ ID NO: 300324 - DNA, 449 bp, Glycine max
  unsure (1)..(449): unsure at all n locations
tgtaatacattgattgctctatatatctcatggctcttggattctaagaaaaaccaaattcctttgaagtcatgtcacaatataagccttgatcgagttcttgtgattctcatgtgtgtgcatgctctttattgcttatgagaaggaaaataaagttgaattgtgtgatgcatgattgtgagttgatatcacctaaagtaattggtggttgagtgacagacatgtacaatgtgataccctctacccctcacatatatactaataaggaataanaaaatttaaatattaattacaagtatgtttaagacaagtctttcanagggaaanaaggctcacattcattntcttttacatcatattcaaatntgtccaaataaataataaagtattctcgaatcaaacaaggtcgtctaagcttcatacaattaatatagaatctggatcctaat

SEQ ID NO: 300325 - DNA, 313 bp, Glycine max
  unsure (1)..(313): unsure at all n locations
ttctttttcttctttctctgntcgctcatgttcatcatgaactttaagagatatgatcaaacattngatttttagattctaatgtatgatagataatctgttagaaaagaaatatcactttcttacatagatcttactacttcaagacattaatatctaattgttaactttggattcattcaaaaagatatacactattacaaaagttagatacattaactgaaaaaaattgtgtcagattatccctttacataaaaattaaattgctaatatagatatcgatacatctggtaataatacgagacattatact

SEQ ID NO: 300326 - DNA, 398 bp, Glycine max
  unsure (1)..(398): unsure at all n locations
tacgatcattccaagtggatcctatataagattgaacaatatattttaganaaattacggataacaatcttctttttgtttaattgaagagaaatttaaaagagagaaatgatcaattgactnttagaaataacaatttaaaacattatgttctttcattttttttttcaatttaaatttcattctcaacaatggtattcaataatttgaaaccacgtgaatcagtttaccctccaaaaagcacgtaaatcatgtgtacatactcataaattcattctttcaatgtgcgaagattggagagaccattacttttcattggaagtaattttgttggacgaggacatactaacaaatagacgtggatcgtaaaattcacattcggttgcgcctccccaact

SEQ ID NO: 300327 - DNA, 393 bp, Glycine max
  unsure (1)..(393): unsure at all n locations
agcttttgatatttataggctttcttcttcaagtgtttgttgtctctaaatgaatagatttcttcacttgagttcacgtatgaagatatggtcattgggacattaaatgcaagtccttttcatgttgaaaaaccactctctttagcttccttgaagaacatttaaggagaacaccacttgcttttcatcaaagcaagtctatcatagcangagaggtctttcgatattgcttagaatttcaaagtgttgaatttcatttatgtttcttaggattaaaaanatcctaaggtaatgtcttataagatagttcttggcaaatgaatctcaaacacataatattaaatgaagtctaaatgatttcttaaatgatgtatcagataccataacatatat

SEQ ID NO: 300328 - DNA, 433 bp, Glycine max
tttactttgatctctttgtgcgtttgtgcacatgtttctttatcacccgtgtgagtgtttgtgattcttttcacaccttaggtccctcttgtatactgaggaatgctaacaacatattgttgtaatcactctgtaatattgacaaaaattattaaaaatcacacaatcttgtgggtcctatgtatttaatgagtttcactcgtgattgtctagtcatcagcaaattctaatcaatagtagagagcgcatcacagattgaatggttagcattcctcttgttctattaacataatgtcttgatagattaggctaacactgcttctgatctcaggtagacctagagttgatggtgatgaagaagaggatgatactgatgatttagaaagtgaatttgatactgcgagtgcgttctctgctatgatattgccaaata

SEQ ID NO: 300329 - DNA, 396 bp, Glycine max
atctatcgattagactacatgaggcgcccacctcctgggtgtagccaacatacgatcgtgcgtatattctattgaggactatactctaacgatccgactatgcttgacattgctcgaggggtgatatgatactcatagaccactctgtgctaccatactcatcattgacgacctgtgcttcggttactacaacattacgtgggaatagagaagcatcatgaggttaaggctccaataggacatagacgaatctcattttgagctgaggcatcaaaccttgcactctatgggaagataatacattcatgatagcagatctatgtctttttacctcactcctatctatttggcaacgtggttgacatactcaatgatgtccataacgggaccaggcaa

SEQ ID NO: 300330 - DNA, 315 bp, Glycine max
  unsure (1)..(315): unsure at all n locations
tatgcatgataagaccccanagattgagaagaggagagatctttcattantatggaaaagcatatctacattgtattgaagactgaatgaataactctaggatagatgaggtgaacatgttcttgacactgtgtgattatgattttatctataatgtaaaaggttgtaatgccttcatgattgcaattgaactagcattggttacattcatatgtaatttctctcaatatcaaggtttgtgacccaactgtgactacaatataaagccctactataaaggattaccttaaatgatctatgctgcaatgattcatg

SEQ ID NO: 300331 - DNA, 328 bp, Glycine max
  unsure (1)..(328): unsure at all n locations
tagcttttattttcaatttagagagtctcgatatgttacgagactcaatcggacatctaagtataaagttattgtcgtttgaattctatatgagcttccgttttcaatttggagcgtctcgatatattacaggactcaatcgtacatctaagtataaagttattgtcgtttgaattttctcagagcttctgttctcaatttcgagcgtctccatatattacgggactcaatcggacatccgagtaaaaagttattgtcttttgaatttgatatgagctttccttttgaatntggagcctctcgatatattacaggactcaattagaca

SEQ ID NO: 300332 - DNA, 435 bp, Glycine max
  unsure (1)..(435): unsure at all n locations
ntctagctnttcattggtgtattttgatctccttttggtactctataatgtgggaatgtgctcaaatatgtggngcaattntggtttggtttcttgcttgattgggttggattgggggtttgtatgggatggccctatgcctataattgcatttgaaacaatgggacatgccacattgtccccgttctcttgctattgatacctaaacgcgcgcccaccaagtgttcggtgaaatgcctcaatggcattagcgcgtgactnttgtaaggaaacaacccatggnngcatttggtttgcacatattntctattttttgggacatgcattcattcccgaaaaggctagagtaattgccccacatatatcctangcctangaaccannagtnttatgcanaagaacacaagaggaagtgcatgttgggtaaagttactc

SEQ ID NO: 300333 - DNA, 406 bp, Glycine max
  unsure (1)..(406): unsure at all n locations
ttagcttattctgtaagtccaccaataaaaaaatgtttttattagtatttaaaaagtaaaaaatgcctcatatagacattgataaaaaaaatcatatgttagaaaaaaaatccaacatatttaaaatttaaaaagtaaaaaaattctcttaaaattttctttaaatctcgtttattattgggtgatcgtgcaactatctgattctaaaagataaaataatttacatgttgatgacatacgataaacttatcaccattagagactaatttacatatatagatgtgaactttntaagaattagatcaagttgtggcgaattctatggtgaatcacccaaacaagtgttgtataatgaaccactattatttatcatcagattgatctcaatttatcctctcatnctaca

SEQ ID NO: 300334 - DNA, 425 bp, Glycine max
tctccctcttttccctataaatagggggaggagggaagaacatttatgttcaaccctcctggtatctgagaatcacttaaaattactgagaaaaattgtttccatgatgataatccaagccgaggctgcttcgttacgcgtccgaaacgtttgcgtgggtgatcccgcgaggatgtcccaccgatcttcgtcattcttcgttcgttcttcggctttcttcggtcttcaaccggcaagttcccgaaatcgaacttttcaatgcattctatgtacccttagtggaccccacttgtttggcgtgcttttatatatatttcatttactttccgtacccgttttgacgtgctttagtcatttatttaagtcattttctcgcctaatcagaaaataaaatatatttccactgatcatttgaattgtaacat

SEQ ID NO: 300335 - DNA, 325 bp, Glycine max
  unsure (1)..(325): unsure at all n locations
gttcacttgcacaagacattcttataactaagaaaaatgcacccatatacaatcaaggcaccttcgttaccaagattatttacatgtacttccaaggtgtatttgttacctacatcacatgcacttccttggctaaatntacatacatgcatactcaaagcatttggggtaccaaatattgcacatgtgcacattccggtatttctaatatttacgcatatacaaactttgtgatgaatcttggctatctacacaataaggtgatacatttcatgctttattcaaagtgttttgctacctaaagccgcatgcgaattcaagtata

SEQ ID NO: 300336 - DNA, 462 bp, Glycine max
  unsure (1)..(462): unsure at all n locations
gcttagcttctaaggaagttttctcaaagaagcttctcaaggaatttttctcaagagagcttctcaaggaagctacctagtctataaatagaagcatgtgtaacacttgttgtaactttgatgaatgagagtcttgtgagacacaactcanagttcaacttctctccctcttttattccttcaatttcgtgctccccccttctctctttcttttcctccattaaagcatcctcttcaagcttcttatccaaggcaattcttagtggtgaagctccttcttcctcggcttattccctagtggatggtgcctcccctctcctcttctccttttccttccgttgcatctacatggtgtaaaatcaccattgaaggacctcattgaagctcaaagatccagcctctatagaagctccacaagaaagcttccatcatttcggcccacactctttaaagatgctcact

SEQ ID NO: 300337 - DNA, 449 bp, Glycine max
tcgatcacctaaggccaagctgcatggtggttcgggctttcgactacaactgcctagacataaggggggagatcgatctcccaattcaaattggaccccacatatgctaaattactttccaagtgatgtacataaaccctacctatagatgcttactaggccggccttggattcatttagtaggagtggtcccttcatgctacaacaaacgctgaaatttgtggtggaggggcaattaattatagtcttgggagaagaggacattcttgtgagttttccttcttctacatcttacaaggaggccgtggaggaatccttggagatgttctttcaagccttggaggtggtaagcatgcttatgtggagtctcccccagtacaaccaccctcatctagggctgcattaatggtagctcaggtgatgctagggcatcaataaaggctggaatg

SEQ ID NO: 300338 - DNA, 381 bp, Glycine max
  unsure (1)..(381): unsure at all n locations
agcttgaagatgaagctatcttgcgaagcattggatgagattttgagtgattatgaggtttctagaggtggaggagacttccccactacctgttattctgtaatctttcactttctcttctctttgttgtaaaagaagtctccctgctatggagagctaaatcctcaattggttcttcctatggagtacttgatgtaaatacttttatatctatctgatgatattttatgtgttctctatactatcaatacttcatgttagtatgtttttgccttgatcacgtagatgcatgctgagttagggtcactcaacattgngaaatggtttgatccttagaacttgataggacggngttagtttatcgtattgtcacgagggatc

SEQ ID NO: 300339 - DNA, 461 bp, Glycine max
  unsure (1)..(461): unsure at all n locations
gcgcgggtctgggagacaaaggtcaagtggtcgcgatatgcgaagatgatgttccgagtacattggatttggtacgaccatgccctcctgatttccagctgggaaattggcgagtggaggaacgccccagcatttacgcaacgagcataatgtaaacctttacggttttaaaagctctatagttgggcctaggctttagagtttttccttttgttaaggctttgtgtcttttgttttttgaatttataatacaaggatctttcttcatctgttcctacgtctctacccattctcattcatttgcatgtttacttctttttctgaaacgacagatccgatgacgagtcccccgaaggtactaatacctgngacccgcctatcgacttcgagcaagaaatgagtcanacggaagatgaaggaaacaaggatgtgggaacttccccagaattagaaagaatggg

SEQ ID NO: 300340 - DNA, 416 bp, Glycine max
  unsure (1)..(416): unsure at all n locations
agctttgttgcattccttgtcactgccattgtctctgaacgacctttgttgctttccttgcaaacattcctttggcacgacctttgtttctagcttcggataccctgagactagggttaggccctttgatttgcactatatcagaggtgagtgagcctattggaaattacccctttgttcttagtcattattctttgtgttggtgttgatgaagctccattgttgtagctttaggacttgtacttgctatttctttcatccacagaaggagcattgtaggtaaaaatttgcttttcttgtataacatttcactanacatatnggtgtattgcatgggtttgttctatacttggtgtgtgtataattgaatacaaattttggatttgctaatcccttaaaaaactgtggttgtaatc

SEQ ID NO: 300341 - DNA, 411 bp, Glycine max
  unsure (1)..(411): unsure at all n locations
gagatgaggaagtgtagacgggtgaaacttcctgcttttattcgttgaccacagagtggtacttggagatatgtcgcgggggtcaggagaccttggggacgtcaagtggggtgctatttcccaaaaccaagcttgaccaatcccgacccaacccgggcatagtcggtcagtgagaacctgtgatgtacctaaacaggcgagctcctggcagtcaacagataaaaggaacaaagaccacaaaacaaggaggcttgtggtggctggctagctgtgaatcttgtgtgatatatgggttatggcctctggtaatcgattaccaagggtgggtaatcgattacaaggcttagaaatgaagacaggaggctaagatggtctctggtaatcgattaccacggngtgtaatcgattacc

SEQ ID NO: 300342 - DNA, 304 bp, Glycine max
  unsure (1)..(304): unsure at all n locations
tccttaccctcggaagcaaaaaagaagagaaggaaaatttccaatccaaggaaaaaggagaaagaaaatttccaatcaaagaggaagccaaaaaaaggagagaaggaaaatttccaatcaaagaaaaaaagagaggaaaggaaattcccaatcaaagaatgggagagagcaaaaagaanagaaagaaattcccaatcaaagaatgggagaaagaanaaaagacgaagaagaaagggaagaaagttcccgatcaaagaaaacagaagacatgtgccgagagggtcttggacagacaatatctgac

SEQ ID NO: 300343 - DNA, 247 bp, Glycine max
ttattagaggggatgcgtatctaaacattaacttctcaaggaagcttctctaggaagctttcatttaggtactgaccttcaaagttccacttctcttactattttggctccttcaattccatgccccccctctctctctcattcttttcctccattgaagcttcctctctaatgtgaagacttcaaagctccacttctctccctctattgtctactgtaatctcatgccccctctctgtatattctt

SEQ ID NO: 300344 - DNA, 367 bp, Glycine max
  unsure (1)..(367): unsure at all n locations
agcttgttaactntagtccctatgctacaaagctgattctgaggacaatttattatcatgcatagcctgccagagttggctcacaacaggccaatcaaacctatggagcattttcttaagcaagtaacctagcctgaagctcaacttccattggtgagacccaatgaggctgctcctcctgagcccatacttgcacaggttgaactagagccaactgatccacaatctccagtggtgaatccaccttcttctcctgagcttgaagtagttctcccatctccacctctgattatcatctccgattccccatctagagaaactgntgctccccctgattcaccagctcgagaagtagctgatccccctg

SEQ ID NO: 300345 - DNA, 437 bp, Glycine max
  unsure (1)..(437): unsure at all n locations
tataagaacaaaattgccttaatcatttacaaatatgcatgtgaattangacgcatcaacaagaatcaagccaaggctattgtgcaagcaatcaatggggcaaaacacaccaaatgattataatgatggatggctcaaattctcacaaaggtaaaatcatcactttcaaattgagctttcaaaactatcatgacatgtagagaagaatcaaggatttcaagtcacaaaatgtcaagaacttttattttcaaaacaattacccatttcttgaacatatcctataattcaaagaanaacatgcaaagtcgtacgtgcacacataattgacccataatattaaactgaatatccgacgaaactaacaacattaacaaattaacacaactaacaaatgaacaataccaacaaaactagcataacctaagaacacttccccc

SEQ ID NO: 300346 - DNA, 362 bp, Glycine max
ttctttaaactctgtacaacaatgaagctctgataccacttgttaaacaagtggcctcagatatcttaagaagggggggttgaattaagatattccaaacttttctcctaattaaaaatctatcttactttgtacttaagttatgaattcccttaatgacaatcttcttatatattaattcaaatgaagcagcttgaattatgaatataaagcaataataaataaaggagatctaaggaagagaacatgcaaactcagttttatacttgttcggccacacccttgtgcctacgtacagtccccaagcaacccgcttgagagttccactaacttgtaaattccttttacaagttctaaacaca

SEQ ID NO: 300347 - DNA, 258 bp, Glycine max
agcctcagacaggtgcacgaaagacttcgcagacgatggaacttagtccgctccggagtatgacagtcaccgctttatgagcgctgtacaccaacatcgctatgaggccatcaacggatggtcgtttctccggaagctactcgtccacctcacggacgacgagtctactgatttccacgatgagatatggcgcctgccgtgggcatcagtggttactcccatgctcatgtatgatccaaaactaggacttgagtttat

SEQ ID NO: 300348 - DNA, 426 bp, Glycine max
  unsure (1)..(426): unsure at all n locations
tggaagggtgattatgtttagataacgtttatgtcgagtgtatattattnttctttcaagtttcaattgtacgtagcttgtgtcttcttcacacatagggcatgcataatggcctttaacactatttccactcaaattctcatatgttggaaagtcattaatggtatagaatagcattgcacacaacttgaatgtctcattttaatacccatcaaatacaacaaccccctcgtcccacaactttgtcaagtcttcaatcaagggactgagataaaacattaatgtcaatttctggttgtctcatagacaacatcatgtatgttcgcttcatgcacaaccaatgaggataattgaaattactatcaaaacaggtcatgaactgtgctgagagcttaaactaccatagagattcattccatcactggt

SEQ ID NO: 300349 - DNA, 449 bp, Glycine max
  unsure (1)..(449): unsure at all n locations
agcagccaccccttcatgtgaaatgcaccgaanatttatttagttacaagtcacgtaccaacgaatcactacttaaatcgcagtaaaaagaagtagtagatatctatttgcaaagttcagaaccaaacaaaaaaaaatggttaataagaacattactggtatctagagagcaaaacagcacggtggtaagcgacggttacattgaatttgggaaaataggcaccccttcaagcaccctgtttcttccacttcttggcgcccttatcagcgacactgagaatgcagagaaaagatgccaagaaattctcgttgatggaatccccaacaaacccaatatttgtattcttcatcatacccagaaaccgaaccgggtcgatccggggcatgtggcagttccgtgggacccatctncactagttgatgacggtcatgttctgccgctcattccg

SEQ ID NO: 300350 - DNA, 324 bp, Glycine max
attatcttttagtaatcaatctctaaattttaggatgaaatgtatgaatgtggacatgatgaacgccatggttgtatatacaaaccaattgaccaaaaagcttaccttgaattataattgtatcctttgcaccctttgtgagccaaattaaagttgcaaaattgaaccctgaacttgaatgactatcttcaaataccttgcttagattctacgatagcatatggctcaaggcaatttacctcaacattgggggagttaacggggatgtaaagtggaatgtaaagctcatcaacacacacaacacataagttgtgttaaaaaaaa

SEQ ID NO: 300351 - DNA, 431 bp, Glycine max
  unsure (1)..(431): unsure at all n locations
ntgagccaaaatcctgactcaccatanaccttgacctcaggtgataatgccaatccttaccctcggaagcaaaaaagaatagaggggaaatttccaatcaaagaaaaagagaaggataatttccaatgaaagcaaaaaagaaatgaaggaatattccccaatcaaagagtgggagatagcaaaaaaaggaaaagaaggaaaattccccaatcaaagagtgggagatagcaaaaagaaaagatagataattcccaaccaaagaatgggagaaagtaaaaaaggaagagaagatagcttctggtcaaagataccagaagatatgtgcagagaggtctttagaaccgacaatatctgaacaatacagaattgtcactaaatgaacaaaaagaaggataggaaaccgtgacctanaatggtcttctccctttaat

SEQ ID NO: 300352 - DNA, 401 bp, Glycine max
  unsure (1)..(401): unsure at all n locations
ttcttcaagctgcttaggttgtcaccctatatatgtacactgacatgcttttctatggtaccacaaaccaactagacttgtcatctctcaacatcaccttttttttttctcttcagccaataagaatttcccagtttgaccactcaatttccagtaacagtcaactatgacttgattaatgagaggtaataaaagtaattttttttataggggaaacaaaggtacattttcttgccaaagtcaagaactaattcctttaaggatttaacctcttcaaacaaatatttattcatatacgttgggcagaaacagaaaataccaaacaccatataccttgggcaatggacatgtcttanaatgctttcaanggacatgtagtaatttaatctcataacatgtct

SEQ ID NO: 300353 - DNA, 419 bp, Glycine max
  unsure (1)..(419): unsure at all n locations
ttatggagaaacagtacacatttgatagttnctggtcctggctntagccacttggtcccaattcttcagttctccaagagacttgttcagctccatccaaactntcatgtcacatgcctaattcccacactcgtgtctcccccaagtgcctcaatatccatccttcaaactcttccaccaaacatcaacactatttttcttcaaccggtgaaacctgaggacctaccacaaggggctaccatagaaactcaaattcagctcatagtggctctctctatgccctccatacatcaggccctgaagaccttaacttcaaggactcgctntgtggccttggtggctgattcttctgcctttgacgcattagatnttgctaatgagttcaacatgttgtcctatatntacctccccatatcagc

SEQ ID NO: 300354 - DNA, 331 bp, Glycine max
tgtctagaggaaaagatcctcatggcagataacaacaacagtcagttcatttgtgagggagcatccctcacgaggtcaccaggcttcacaagagaggactatccttattggaaagacaaaattgagatgtacatcaagttcaacccctacaaactctggctaatcatcacaaatggagatatacccattcccagaccttgtcataatggagctaaacacaaaagttcattatactctaacatgtagtctatcaaggaatgagtacaacaatatatgcagaattaagacaaccaaagagatttggaactcactgggcatcaactatgaatga

SEQ ID NO: 300355 - DNA, 468 bp, Glycine max
actcagcttgtcaaaagggaagcaagttaagaaatcctttcaaagcaaaaacgttgtttctacttcaaaaccccttgaactacttcacattgatttatttggtccctcaagaactatgcgtttaggtggaaattactatggcttagtaatagtagatgattactcaaatttcttggactttgtttttgaaaaccaaaaatgaagcttttgatgattttcacaaacttgccaaggtgattcaaaatgaaaaaggtctcaacattgtttcaattagaagtgatcatggaggtgaatttcaaaatgacttttatgaaaaaaatgaaattcaccataatttttctgccccaagaacatctcaggagactggtgttgtggagaggaaaaatagatccattgaataaggtgcaagaaaccttctaaatgaaacaaggttacctaagtacttttgggaagatgtatacatactat

SEQ ID NO: 300356 - DNA, 393 bp, Glycine max
  unsure (1)..(393): unsure at all n locations
agtggcatttcaaatgcaaagaatggatgtaattgaaaaactaatgctgggtatggagctacagttggattgcttcactttcatttgaaagtttcattgtaaggcattcgctctccacaacatcataacagaataaaaatagaaataagaacgagttataaaaaaaactagcttgcaattgaaacttttttcttgtgattttcattgtaagaaagaaagatgaaccacttangaagcaaaagatcaaggcattatctttattgaagataccatgaatattcttgactaaatataaaaccaccataaacattntccagcaaaaatatctcatattatcatataccacaaaanataaataaataaataaaagaaaaatcacagcaacaacaattc

SEQ ID NO: 300357 - DNA, 468 bp, Glycine max
  unsure (1)..(468): unsure at all n locations
tatcctgacattgtttcaaagcctccaacagtccaacttgctcaactcactcaaattactagacaatttaaaataaatacagtgactatatgcatgtttaatattaaagtatattttctttatattattagtttacatgtagataagatttaataaatagtcattaataatcacaatcttcaaatcaggattaccactaaactaattaattgttacaaatcaaatcaggatcattaattttcgtgaccttgtttgaacctattgtaacagagaatggcaagtatatgagttgtctcattcctttcacgcgttttgtttttgtcttgccttggcattntctcgggctgttcagtgaccaccatcacttggatgtctgtttattcgtttggcactgcgctnntgggttagttagccacacttctagttgtggcctgcactggaagatacannatagtagacaagttaaag

SEQ ID NO: 300358 - DNA, 309 bp, Glycine max
  unsure (1)..(309): unsure at all n locations
agcttgtatgtgatcaagtttaacttaccaacaataacaatttcctccctttgttatattctctcacctagcttcagcaattcagcttttcctgtggctcttcccctcctttttcatatctttttctctgtctaaggaagtgtgcagcaaaaaaaagaaaactttgttactcagtatgttaatatgacgacgaanatggagaactgtccaccttaccgcactcccatccttttctttntgtattggttctggtaaacgtcaagtgagaagccccactaaacatatactatatattaattaactatatat

SEQ ID NO: 300359 - DNA, 432 bp, Glycine max
  unsure (1)..(432): unsure at all n locations
gaatgctttctgtcttgtgccaatggaataaattgacttgtcgccaagttttggactggttcctgaaccataatgatactggtcaatctttagttcaaatggacaagctaaatgtgaaatctaattgtcacctatacaggaatttggagggaagagtggaaaggcggcagaaaacagaactcatacctgtagtgtcaagcacagaagaatgacttttctttaaattccccagactttcttcttcaaaacgttcacgaccctcagagagtatgccaagataagcatacacattggtctgaatggtcaactntatattntcacgttcatcttctgannagggggtgcttttgtaaagaatcttggcctgacataagcatttacaattctataaatacattgatttcttggctttcttcaacaacaacatgcatg

SEQ ID NO: 300360 - DNA, 373 bp, Glycine max
  unsure (1)..(373): unsure at all n locations
agcttgtttcanagaggtccaggaaggacaaggcggccgaaggaactagttccgccccggagtacgacagtcaccgctttaggagcgttgtacatcagcagcgcttcgaagccatcaagggatggtcgtttctccgggagcgacgcgtccagctcagggacgacgagtatactgatttccaggaggaaatagggcgccggcggtgggcaccactggttactcccatggccaagtttgatccagaaatagtccttgagttttacgccaatgcttggccaacagaggaaggcgtgcgtgacatgaggtcctgngttangggtcagtggatcccgttcgatgccgacgctatcagccagctcctgggatatccgat

SEQ ID NO: 300361 - DNA, 401 bp, Glycine max
tgaatcggacatccgtgtgagaagttatgaccatttgaatttctcaagagcttccgctgttcattttcgatcctctcgacatattatgcacccgaatcggacatctgtgtgagaagtcatgatcatttgaatttctcgagagtttccgatgtataatttcgagcgtatcgatatattataaccctgaatcggacctcagtctgaaaagttatgaccatttgaatttgacgagagcttccgttgttcaatttcgaatatcactgtatgtgatgcgcctaaattggacattcgagttaaatgttatgaccatttgaatatctcaagagcttccgttgttcaattctgagcgtctcgatatgtgatttgcctgaatcggacatccgtgtgaaaacgtatgacca

SEQ ID NO: 300362 - DNA, 385 bp, Glycine max
tgaaacagatatcaatatcatcgctaatatcctccagaagtgatattgttagattcacctacattgtattcatgaatgaataaaaatagcctatcaagaaattaattgaatcaataatgctagagatcctttgttaagacattctacttaattatctttctcaaaagaacctcaattgcgatatatccttaattcctcaccatcatagccatggacccttctggtttataacggcacataatgtatggaatatccttcaactctgtacaacatatatctgccacatgcctcacattatcaatgggtctcttgatgacaacctcttcagcatgctcaatgatctgaggtacagctggctgccaatgccaatcgagataagccatca

SEQ ID NO: 300363 - DNA, 317 bp, Glycine max
aattattgtataaatctttaatcttacaaattctttgttttgtatttggctactccacatgaactaatggtttgcttattaaaacacattaacaccacattaatgatctgaggctcgagacatggatatgatgaaaatctaatcgcaaccaataatagatactttttttaagaaaaaaatatggtgcaaaagctcttaagaagattcctatattattattgcttataataaatcctatcatccattaacagctattaacttttttgataaatcatatgcgcacatttgaaattttaattaatgtataagaatatctt

SEQ ID NO: 300364 - DNA, 384 bp, Glycine max
  unsure (1)..(384): unsure at all n locations
tagcataactaattccctgaatgacaaaagtcaatagttgaatatgataaccaagttaatactgtgggtgaacatttgttatgcgagaacaagttcgagcagattgtctccaatgaagaatgtaagtgttgtactttgtaacagacatagaaaagaggcagagtgagaacttgacaaaacctgcgggatggccaagctagcaatagtgatgccggacacaaggtcagatttgaagagtttgagattatacttangaccccattggagaatagggaacacatattgagctccaaggatcagttntctcttaagaggttgtcccttgaattggcgcagaggatcatcanggaagaaagtttccttgagcctacccttgagtttctg

SEQ ID NO: 300365 - DNA, 295 bp, Glycine max
  unsure (1)..(295): unsure at all n locations
tatttttggagtgattaaagaactctatcccttatatataaacacaaacagctcgcgttattcaactagcaccatcaccaccttatccgacaacaaggcattcaacaccaatatttaatcatcacaatactacccctaccatangcactggataagattaagataccaaagcaagaatgatgcatcacatcccttgtgttngctttataaccaagaccaacctgtggcacatgtattgatgttacagcatttcacaatcaaaagttttaccctcanagacacacatatattttat

SEQ ID NO: 300366 - DNA, 419 bp, Glycine max
  unsure (1)..(419): unsure at all n locations
taatacatgaccgggtcactctctatttagacggctgaagaatttattacaaatttctcacacagagattacgctttagtttctctcactagaatccttcaacttgtattcaagatgctcttcaaacatgtcttacagctctatggaagaccattgaaatgggctctacccaactgaaaaacttctggaacaagtagacaaacatgacaactatcatgaaatgactgctcgcataacattctaagacagacattctgaggaacatnttgtataatattcttgaagcatctgtacaatagtcattctgatgtttgctgagaaagaatttatacttgtagtagattcttttgatgaatttcaactaatatgcctttctaaagtaatgcagcttcatcaatcataacacatcgtcacagcac

SEQ ID NO: 300367 - DNA, 212 bp, Glycine max
gtcgcctgctgcatgcattctttaaattgaatatgcaacgctccgcataatttcgaactgctgtcatccattacaatgatttggtaatctattaccactgcctttgaatgctgaaatttgaattcaaaggtgaatagtcacaacctttcacataacagctttgtgtaatcgattacacttatttgtgaatccattaccaatgattgcttctg

SEQ ID NO: 300368 - DNA, 396 bp, Glycine max
  unsure (1)..(396): unsure at all n locations
tgtagatgcttcgaggctctccaatgtcaaaccttgngtttgatgagcctttggagaagcaagactcactaagggtggatcttgggtttgacgagcctctggagaagtgagactcaactaggacagaccttgggtttgacgagcctttggagaagtgagattcaccaaggatagactttgggtttcaaaaacctataagtctcaccaaggacaaaccttgtgtttgatgagcctttggaaacacaagactcaccaaggacggaccttgtgtttgatgagcctttggagaagcgagactcaccaagggcaaaccttgtgtttaacgagcctttggagaggcaagactcactaagagcaggcattgngtgatgagtcttagactanggaatgctcgac

SEQ ID NO: 300369 - DNA, 282 bp, Glycine max
  unsure (1)..(282): unsure at all n locations
tttatcttttatgtgaaaggatgtgactcttcacatttgaatttgaatttcaacgttcaaaagcactggtaatcaattaccaaaacattggaatcgattacagctttttgaaattaattggaacattggtaattcaatttgaaaagtggagccttagattacaattgtgtgaaattatgtatctaaacttttatttctttntattntttgaggtcaacaaaagtggagctcttgctcctacgtacccttcatcgaagaggaaatcagacctacgtaattctt

SEQ ID NO: 300370 - DNA, 435 bp, Glycine max
  unsure (1)..(435): unsure at all n locations
tgcggactataccttctaccgaacatggccgtgtttctgtctatgcccggattcaaggcgagctgcagcaccagctccgcttccctaactgtactggaggcggttgtggtggctttatcctctatggttttctggagttttaacatgacctccgagatggaagccatttgatcttttaaggccgatagatcggccttcatctattcctacacgccctcttcattatccatttttctggatcgagtgttataggggtgccttggtgttttcttagttatgatcaaattcctaaagaaataaacaatggtgagtatgccaccaaaacatgagtatgcaaatggatgatcggagcgcttggatccaccccaaggttttttagataacatggtgagtccataacttctcattntatataaagaacanagctttcatcta

SEQ ID NO: 300371 - DNA, 354 bp, Glycine max
  unsure (1)..(354): unsure at all n locations
tccttgagaagctagagcttagctacacacacccatctaagaactaagctcacctccttgacaaaatacatganaatacaaaaaanaaaaagtccctacaacaaagacaacccanaatgccctcaaatacaaggctaaaaccctatactacaagaatggccaaaatacaaggcccaaaagaaggaaaaacctattctaatatttacaaagataagcgggctcatacttagcccatgggctcgaaatctaccctaaggctcatgagaaccctagggccttcccttggatctctagcccaatcaacttggagtcttctacccaatgcccttgcggtgtangattgcatcaatatgt

SEQ ID NO: 300372 - DNA, 302 bp, Glycine max
tctgctttgcggatttggtcttcgccggcgaaaggatcaaagtgggtctagaaaaaggcaaatttgatcatcctgctctgatgaatgcgaaaaatggggaaaatgaagaggatgagaataagggagaaacccttgctatgactgccattcctacacggtcaaatttcccatcagcctaacaatgtcattactcagccaataacagtccctctcacccaatcatccacaaaagtcatccccaaatcagccacaaggcctgcctgcttaccgcacgcccaatgcccaaacaccacctttagcgc

SEQ ID NO: 300373 - DNA, 432 bp, Glycine max
  unsure (1)..(432): unsure at all n locations
ntctcatgagctcccttgagtgctccttgaggaatacanaaatggaagcacatgggaagaaaaaaggttattaccacactaagacataacccaagaataacaagaggagaaatgagctttcttttgcacaaagaggaccaaaactccaactcttaagataagggttctcttggagaaggagaatagagtagagaatgatattgtgatgtgagttgtagattaataaaggttttatgaggagtttatgattatctcacttctttctgtatgcactctacacttcattaaacttaatcaccatttttgtgacccaagatccatccacttatgtcgcaacactctataactcatcaaaacacacatataacatgacatatacataaacataacagatcattatctcataattaattaagtaataattatcgacac

SEQ ID NO: 300374 - DNA, 409 bp, Glycine max
  unsure (1)..(409): unsure at all n locations
agctttcttttgtatgtgacaatggtttcttgtgggatgtgatcaatccagaatccagtgaaccgcaaccagaagatggagtgtctagagaaaatgcttctgaggtgagtatcttttatgtttttggtagttgatttgacttgtttgtttaaggaaataggtgatgcttggataaggggtatgtggactanaaattccaaatggaagtggttgtatagagaaatcacgttgtttatggaattgtgtancatcaatgtgaaggctaaatcactgaatggggagtgaactggcttcacgactgctactgctgtcttagacaggcttcttanattcctgcttataaggtaatggcttggtataatcagtcccttgtatctacccattatccaagtactcccttgttattggt

SEQ ID NO: 300375 - DNA, 450 bp, Glycine max
  unsure (1)..(450): unsure at all n locations
caattcagctcggacccgggatcctctgagtcacctgcggctgctgcttaatgtaattnngattntttttttaaaaaaaaaattgtaattttgatctcttattctaaaataaagacatttagtccccatatttcttaaaatccataattttaatcccctattttaaaatgtagacatttagtctcttgcttttaaaatctataattttggtcattctctcaaacttaaagcaatgatgttaagaaattaataatgaatatgacataaattaaacaaattatcttttgtcactaaatttggaccacatcaaattaatttcttaccatcaatgtnnttttaaattgatgaaagaatcataattgtgacatttacaaagctaaaggactaaatgtctntattntataatanaagaactaanattatgagatttaaaaaataacaaactaaaat

SEQ ID NO: 300376 - DNA, 430 bp, Glycine max
agcttgtattattatggggtacccatcacatgtggtactaggtggcggtcgggcgatggtgcacaacaagttttccacatccacaatgcgcgcataaacccaccatcccctgttgcccacctccaactgagctcacatactcccacgtagcccatatcctcgtttctctcaacaccgggtccccatcaatcctcccaagcttccacaacatccaagcaaaacaacattcaaacagcacaagctatcacagccaagcaaaacagggcaaaggcagaaaactctgctcaaacaccaaccaaaatcacagcttttctcacttaaagaccccaataacaattccttcgatctaattcgttaaccgttggatcgactccaaaaatgtactggaagtctatagtgcataagcctacattttgaccgctgggatctg

SEQ ID NO: 300377 - DNA, 418 bp, Glycine max
  unsure (1)..(418): unsure at all n locations
tatcttcttctacatatggtagcctcgttccaattaagccatagctagcagggctaattgtcgagtgacacctgtgtggggagcaactcaacccttgtgcggtcgttggagaagttagaagaggtgtagaatgcaatctggctcgtcatggggatcatggaggtagaaattgtggcggacgtgtgggactttgacattgtgaagcacacgatgcacgatgtgggccccatagacgtcctgcttttgaattacaacatgttcatgttgcttcttcctaacataaatctaatggcaacattgaatctcctcaagttcgcgtgaggttattagattatgggttgngattcttagtttttgtgagtaatggcttacagaacgtgaaagaatggattggagatttggtcttttggtttataat

SEQ ID NO: 300378 - DNA, 430 bp, Glycine max
  unsure (1)..(430): unsure at all n locations
agcttccactcattaccataaaaaaaacaaaggacattctgaagataatatacctatgaattcttacgactttgatatttctactttntatttttaatcttatattatttcatataaatattttgtagtcctctgatctaaagaatattcaagaaaggagttcgaaaagaaaaagtgattttgatgatgaagttcctttcagttcttctctcanatcaaccccataattgaaaccaaagaaaaaaaagtaagtttctcttanagtttcctttntatttaattagaaattacttcgactaaatttctacgcatatagtagttaaatcaaatattcattttccaaaaatgtaaacatactattttcaggaaactntaagaaagatntattctacacattctaagtctaaagacatgatcgagacacaccttt

SEQ ID NO: 300379 - DNA, 418 bp, Glycine max
  unsure (1)..(418): unsure at all n locations
agcttgtatgtgttcttaaggctttggtccgatggattaaggtgttgatttatcttaatcactcaattttgattcatgaatgactcttggtagttcatggaaactgtgtaaatcaagcccacaattagtatggattccttttgaattttctactaaaaatggttaaagtagagttttgtcaaaaatggatattcttgctttttactaaaactagtaaattctatcctaaacaccttgattattgtgctaatctccctaggattacttgtaactagagtgaaactcacataaagattactcttacatagagctaaattacattgtcactcangatacaacacaattttgntacataaagaatcttcgttcagatagtttccatatctctgtcaagttagactaaacaaattatttacac

SEQ ID NO: 300380 - DNA, 419 bp, Glycine max
  unsure (1)..(419): unsure at all n locations
agcttttatataacattnttactaagtatttggcaaaagaaatgctattaaagatcacatgtgtaatagtgattcaagaatcaggttcaaagatcatgaattgaataataagaaaggttcctgggtagtaataataaggagtgatgttaaaaatccatctatggagaaaaatagaaccaaaagtattaaagaagaataaagagttcaatggaatttttcttggtgaaaaaacaaaatggaaaaaaaatgaagtaaaaaaagaaaaaaaaaagttgaaacaatgacaaaaatattcctaagatgattattatatttgtgatctcatgctatgaatcatggttgggcaaaagaaataattggagaaaaaaattaanaaatagaagtgtattgaaatgagaatgattgattacatcaacaaa

SEQ ID NO: 300381 - DNA, 408 bp, Glycine max
agcctgatttatatttatttattaaactataagtgttcggaacaatcaatggatgaaatactcaaacagtgcagatgactgacaaataatgaaatcatgaattatgtacaaaggatacaaaacaagatgagataaatatcttaacgatcgaaaaaaatattcacaagttagaaatcaaaagctagaatttcaaaaaacatgttaaaagttacttaaaaaacctacttaaaaaactttattatcggatactcaaatgacattcttaactattaaaaaactaaacactaactacaatatcttaccaaaaataatcttagtatttttaatcttgatcatccatgtgtataatcataagaactatattcctctcgcttctttgttttaatcaaccgtgaatctgacttatat

SEQ ID NO: 300382 - DNA, 419 bp, Glycine max
agcttctttttgttctttttagtagcctgcaagttcctcatgtgcaatataggttcacatccaacatctgccactgatctgccattcggtgtttgcaacttaaatcgctctgccttgtatgcagaaaggatattatcttcatcgggtaggtgattgctaactttcatgagtgagccaagagaattcatctgaaaggtttaagatacaatcagatgacagcttccaagaataaaattgaaaactagttttactccagataaaaacaatatggcagtcactattgacccacctagctgagaaaaatgatagaactacagtcttttatgtacttaatgacctaccaattataattattaatccaactacaattcaagatcttaagttgattataaactgagcgaaccatatccaaaccaaat

SEQ ID NO: 300383 - DNA, 416 bp, Glycine max
agcttggatatatactatctaagtattactaacatagaaaataatattgtatgtaatttacagaaagataattttatgtatatattttttaaaatttttaatatatttattactttactaccagtatttttataataaagatgtattcttttttaattgacaaattatttagtttattaattttatttattcaaattaatttattcaatattattgaattccagtcaattacttgctaaaactgaagtctgaaggtttacaaattacaaaatgcattttaaagagaaaaataaaagcataaaatagatatatgaagtagaaaaatcaaataaatcatgtttacagagagttccaatttaatacaacgggctactcaatatgtcttcctctttggtactcttagtcttcgagacaat

SEQ ID NO: 300384 - DNA, 420 bp, Glycine max
  unsure (1)..(420): unsure at all n locations
agcttctcttttcttgtttaattattatattttgtttttaatccttgtatttggctgtgtttttatgacatttgagcacttattatttctttttaatatttgtttagtatgactgaatatgatgattatatttactatctcttggttgtttatggttatgaattttaaacttagttattttgataatatatgatcagtggtatgtacttttatttggttattatgagtgacttttctggattatatgacattctatgaagtatatctttctaagattgatgaatggttaagttatcttgtttgattgttttctattctcttgtatgattagtaatttatgtatgttttatatttgttatgcattttggctttntgttgatgccaaagggggagagaaatanggattaaatcaagaactcg

SEQ ID NO: 300385 - DNA, 427 bp, Glycine max
  unsure (1)..(427): unsure at all n locations
agcttagattctttctaacgacaataactttttactcggatgtctgattgagtcccgtcatatatcgagacgctcgaaattgaatgttgaatctcttaaccaatccaaacgacaataactttttactcggatgtctgattgagtcccgtaatataacgagacgctcaaaattgaatgttgaagcttagagccaattcaaacgacaataacttattactcggatgtctgattgagtcccgtcatatatcgagacgctcgaaattgaatgttgaagctcttagccaattcaaacgacaataactttatactcgaatgtctgattgagtcctgtaatataacgagacgctcgaaattgaatgttgaagctctgagccaattcaaacgacaataactttntactcggatgtctgattgagtcccgtcatat

SEQ ID NO: 300386 - DNA, 413 bp, Glycine max
  unsure (1)..(413): unsure at all n locations
agcttagttctagaagggatggaccttttcaggttttggagaggatcaataacaatgcctataggttggacctcccagaagagtatggagtcagcaccacttttaacatttctgatttaactccttttgcaggtggagctgatattgaggaggaggaactaacagatttgaggtcaaatcctcttcaaggggaaggggatgatgcaatcctccctaggaagggaccaatcactagaaccatgagcaagaggctccaagaagattgngctagagctgctgaagaaggccctanggttctcatgaaccttanggtagatttctgagcccatgggccaaggttgggtccaattatctttgtacatattagactangatgtcattatatntggtccttgtatatanggctccatatt

SEQ ID NO: 300387 - DNA, 419 bp, Glycine max
  unsure (1)..(419): unsure at all n locations
agcttgttttattctntagcaccttggcatataatgctgttcccacttgagtttggataatctccttgttattatgtacttgttcatcttctacacttgtaccaacactaacattgtaatcgttatactttttttttgggcatttctacatgtgactaaatggctgcctacattgaaaccatgtcccttcttcctgtcttttgttatactattgataaggaagcttttgtgctcccctgttactcttgggaatgtggtagtggtggacttttttcctgactgatctcatgctcgatgtcgttccacacccctgtctgaattggagacttttagaattctaagagttctttactcccaaataattgtcaagatcttaagttcattggataccaatttctacacttaactggttcctttga

SEQ ID NO: 300388 - DNA, 405 bp, Glycine max
  unsure (1)..(405): unsure at all n locations
ttgcttatctcgagcacgtcgtcacagtgaatctggtcttggaggctttgacggagaggtgaccttggttcctctcatgacagcttgggaaccctagaggggagtcgaagagtgaaaatgcagagcgcaagagagtacagagagctagacatcaaatattaaaaaaaaagcataaaaccttctaagacgatttttttacaaaaccgtcttaaaatgacagtcttttaagatggttttcgtaaaatcgtcttcgttgaaaactttcgtatttataaaattgtcactgcctatatacgggaaccgtcttaatttcggtgttgtagaaaatatttttttctagtagtgactntctctcttaataaatttaaaaattagaaaatgttctagaattgaagtgtaactctt

SEQ ID NO: 300389 - DNA, 422 bp, Glycine max
  unsure (1)..(422): unsure at all n locations
agcttgcatttgttattgcgaaagccccactccatcattaggattagtacctgacatctcaaacaaacaaatcaaacgtaacaagacaattatagttgctgtttgaatacctcacccactcaagtgtatcacacaattatggcttttctctaatgaaacactcttgccttttaccactctaattccccttgagttcttaggcaattcaagagattatggccacaacaaagaacaattcaccaatatgtgtaaggtaaggctagacaaggaaaaggttaaccaagaaaaaggctaacaatgtttttaggcacaaatgaagganataaaattcagaatttaggaattcaagtaacaatccttcatgcaaccaatatattaccttanagagttttttttttaagttcttcaagcatgaaccattc

SEQ ID NO: 300390 - DNA, 362 bp, Glycine max
  unsure (1)..(362): unsure at all n locations
agcttgattttgttcatcggaagctcttgagaaattcaaatggtcataacttttcacacggatgtccgattctggcaaatcacatatcaggacactcgaaattgaacaatggaagctcttgagaatttcaaatggtcataacttttcacacggatgttagattaaggcgcatcacatatagagacgctcgaaaatgaacaacggaagctctggggaacataagatggtcataacttctcacactgaggtcctattctggcttataatatattgatatgctcgagattaaacatctgaagctctcgagaaattcanatggccataactattcacacggatgtccgattcgggcgcataatatg

SEQ ID NO: 300391 - DNA, 261 bp, Glycine max
  unsure (1)..(261): unsure at all n locations
cacacacccctctcataactaagctcacctccttgagaagcttccttaagaagattcctaacgaagctagagcttagctacacatacctctctaatagctaagctcacctccttgagatgagaagctagagcttagctacacacccnctataatagctaagcttacccccatgacaaanaacatgagaatacaaaananagtccttactaganagactactcanaataccccgaaatacaaggctaanaccctatactact

SEQ ID NO: 300392 - DNA, 311 bp, Glycine max
agcttgttttgatatcaatcttgccaaagagatactcgtttttggactgaaaccccgagccagaggctttgtcaagggaaagagtgagaagatcgccgttgttgagtatcttggcacgaccatctccccaagttacgtcaaaatcctggtagaagttgccagcagaggctgcgatggaagaggccaatacaaatacataaaggacagtttttgttgaaaatgtaatggaatgaagagaagccatgattgttttgaatgaaatgtagaaagaggaagttaaaaatgtagtagcttggtagaagtaatgaaat

SEQ ID NO: 300393 - DNA, 419 bp, Glycine max
  unsure (1)..(419): unsure at all n locations
agcttctattaaagggagaagnnncaatcagttgaaaggcaattcatgagcagtatattataaaaggaaaggattggtacaaagggggttgctctaatgaattgctattttcaagaggaagttaagcagataatgctaatattagcatggcagatttacaagtaattggagaggttgggttggagatatagctttactacagtaaatagactttttccatctaatgaagttgaaatttttgacaggttgggttggagatatagatttacaagtaattggagaggttgggttggagatatagatttacaagtggatctggttactagacgcagataaatgctttngggtggctgcaacatatatccatttcatatgcctttctacacaactgcaagaatatggtctatcagtcactgaat

SEQ ID NO: 300394 - DNA, 394 bp, Glycine max
  unsure (1)..(394): unsure at all n locations
agctttattcatgttcgtgccttcagccattatcttactttgatgggtatagctgacacccaccatacgtatttcagtaactagctattatatagtctcttactctcattacttgataattatatatagatccttataagtacttgtaaatgaagaaaatcacaaggataaatgaaataaacttctcccgtacgtaatagcttatgggggaaacttaatttcatttttccttattttcttcttttataagtgcttatggaaaactttatcctaacagaaccttattctctgtcttgcacagatcntattgcaattccagagtactaatagggactaggtagagtaatcttttaacgaaattccatctatgcagggttcgtacaggagggaatat

SEQ ID NO: 300395 - DNA, 406 bp, Glycine max
  unsure (1)..(406): unsure at all n locations
agctntgattgatttgacctgaaatgttgtttagtgagagatcaagggattctaacaatttcatttttcccatgtcatttggtatccctccaaacagatgatttctagacaagttcaaaaaccgcaaagcagatagcttggaaatttcagatggaattgctccagacagcttattacttgaaagatcaatcattctcaccaatatcagattgtctctgtactctaactcatctcctttgggaactaagacaagagtttccttgtagtggttataactgaagtcagagccatatgaataacttanagggttggcaaagaagtcatcttcaccagccattgtcttcatgtcatccaaacaatntggaatggatcctgacaggctgttattgccaagatccagcactat

SEQ ID NO: 300396 - DNA, 409 bp, Glycine max
agcttcttatcctttgcactctcttggtggcgaagcttctccttccatggcttattccctagtggatgacgcctcctctcacctcttctcctttatcttccgctgcatctccatggttgaaaatcatcattgaaggacctcattgaagctcaaagattcagcctccatagaagcttctcaagaaagcttccatcattaattagcatgtaatccactcaagagactcaacaaaacaacaacccaagcatcaaattacatgcttataaaataaaactagattttatatctttatgcgtgatcatccaaattagtccatcatctttattcctcaagtagctatatgtagttgaccaacttggtctttaatccttctagatgtgaacatgcttcagtgagagttgtcatcatt

SEQ ID NO: 300397 - DNA, 416 bp, Glycine max
  unsure (1)..(416): unsure at all n locations
agctttgcttctatactagtggagggttgtgttttctacctggttctgatatagacaataatgtgagctgctaatatattactatgaaaaagaatatacatcttatcggccttgtttacattttttttgtgtgccataaaaataattttttttaaaaaaagctttactttttcaataaataaaagaatgttttattctctagaatattcctcctcctatatgctcattcctcacttaataattcctccctcatccacacgtcataaatttacatggagtggtaaatagtaatcattttaaaccaccatttntaattctttcaccctctgaaaatgctgcactcattgtattctgtttcaccttcattcaccaagataccaatgcactgcagtacaccaatgcagcacacaattaat

SEQ ID NO: 300398 - DNA, 374 bp, Glycine max
  unsure (1)..(374): unsure at all n locations
agcttagattcctccatcatcaaggaattagggcgggtgatggaacctctccaaatgcaagctttccgcaagacttacggaaagatcttagagttgaccttagcagaggtatccatagaagccattgcatcactcacccaatactacgaccagcctttgagatgcttcacattcggagacttccaattagtaccaaccattgaagaatttgaggagattctaggatgtcctctcgggggaagaaaaccatatctttcatccgggtgtctcccctctntgagcagaattgcaactgtggtcaaggattcagcaagaggtttggaccacataaaacagactcggaacggcatagcgggcctaccacggaggtacct

SEQ ID NO: 300399 - DNA, 366 bp, Glycine max
  unsure (1)..(366): unsure at all n locations
agcttcaagagattcattttctcgacaatattattggtgatatctcanaaggggtaacaactagacattctcttaaagatttatgcaataatatggcttttgtatctatgattgaacctaaaaatataaaagaagccataatagatgataactggatcattgccatgcaagaagaactgaaccaatttgaaagaaacaatgtatggaaattagtagaaaaacctgaaaattatcctatcataggaacaaaatgggtttttagaaataagttagatgaacatggtataattattagaaataaagccaggttagtagcaaaagggtataatatagaagaaggaatagactatgaagaaacatatgctc

SEQ ID NO: 300400 - DNA, 417 bp, Glycine max
  unsure (1)..(417): unsure at all n locations
agcttacttatatttctttgtacaaacaaggtaagacaacacttgagtcttcagctgagtcaactcacaagtttaggccatcacaatttacaagggaaagtagtcactgttgggaggagtctccagatcaaaaaagtggtaccgtaggctctgcatcaaattgatggcacgacaaaacaattttactacatcaggaaacaagcatgatttcaaacaatatgttaataagataaccactgacctgttttcattgcagggtgctgttgatgattcangtccgtgctttcattgaccatcgttttgcttgcatctcttcttttcttcatctttgaggcgctcagagaaccttctactgtagagtatggngtaagaaaacaatatanatcattagtaatgcttaagaggagtaatcagaat

SEQ ID NO: 300401 - DNA, 415 bp, Glycine max
  unsure (1)..(415): unsure at all n locations
agctntggtgtcttactttcgaccataactttttactcggatgtctgattgaggctcgtaatatatcgagacgctcgaaattgaatgttgaagctctgagccaatacaaacgatactgactttttactcggatgtctgattgagtcccgtaagatatcgagacgctcgaaattgaatcttgaacttctgagctaattcaaacgacaataacttttttctcggatgtctgactgagtcccgtaacatattgagacgctcgaaattgaatgttgaacctctgagctaattaaaacgacattaactntttactcagatgtctgattgagtcccgtaacttatcgagacgctcgaaattgaacgttgaagctccgagccaatacaaacgaccataactgtntactcggatgtctgattg

SEQ ID NO: 300402 - DNA, 369 bp, Glycine max
  unsure (1)..(369): unsure at all n locations
agctttgtttgtgttgttccaatggttgcaataccacaagaggctgaccaaagcactaatgcccagcatattgtagatgttcggaaggcgggaatcaaaccttcagttgatgataaacatgttgtgagacgagaagcgttgaagcgttgtacatgggaagtaatggacagtgacagaggcgaagagatgaagatatacgccatgcacctgaagacattggctgcatacgctgctggtgacggtggaatttctcatagaaacattactgaatttgtgaataacttgttccattngtaattaatgcactcaacctcatattacttcttatttactcagtcacacaccgtgcgagaatttacagttgtttca

SEQ ID NO: 300403 - DNA, 407 bp, Glycine max
  unsure (1)..(407): unsure at all n locations
agctttgattgatttgacctgaaatgttgtttagtgagagatcaagggattctaacaatttcatttttcccatgtcatttggtatccctccaaacagatgatttctagacaagttcaaaaaccgcaaagcagatagcttggaaatttcagatggaattgctccagacagcttattacttgaaagatcaatcattctcaccaatatcagattgtctctgtactctaactcatctcctttgggaactaagacaagagtttccttgtagtggttataactgaagtcagagccatatgaataacttanagggttggcaaagaagtcatcttcaccagccattgtcttcatgtcatccaaaccaattggaatggatcctgacaggctgttattgccaagatccagcactata

SEQ ID NO: 300404 - DNA, 422 bp, Glycine max
agcttgtattctcctgactatggaaaacaggtcagtctggtcttctatcgaacatcttcgttgtggtgattagtcggttgctccattgttgttatgttcgttttagttcttattatagtcataaattctcagggtcgagatatatgttacctggcttcgtggtgggcgccaaattgttattgtcacaaatggatcgagtactcgtccttttgccaaagggccttctactatgttgaaggatctctagagttgaagggtcatctgctagttgttccttgtcgaagattcaggtgcatgagcatctgacagagcagagggaagaatacctgcaaaatgctgcaatgctcaagtgagggttcgacttagagttattaatgatatatataatgagtaggtgagaatgaatcactcaccttactcga

SEQ ID NO: 300405 - DNA, 415 bp, Glycine max
  unsure (1)..(415): unsure at all n locations
agctntggtttttatgacttgctccaatggctcatcatgtcttctattgaacctttcttcatagacttgaagagaacccatcaattggtctacggtcattgagtctaaatccttagactcttcaatagcacaaaccatataatcaaatttagcgattaaggagcgaaggatcttttccaccacatgaacatcttccatattttctccataatgcttcatttggttcacaatagccaacaccttgttgccaaaatctgagatagattcggattccttcatatgcaatgattcaaactctctacatagaatgtaacttcataccttgttttcccaacatgacaatattgaaagcataaattttgtgaaagcctaatcctccaaaccccttgttcattgacattntactccatctcat

SEQ ID NO: 300406 - DNA, 351 bp, Glycine max
  unsure (1)..(351): unsure at all n locations
agcttgcctcatagaggtccaggaaggacaaggcggccgaaggaactagttccaccccggagtacgacagtcaccgctttaggagcgttgtacaccagcagcgcttcgaagccatcaagggatggtcgtttctccgggagcgacgcgtccagctcagggacgacgagtatactgattttcaggaggaaatagggcgccggcggtgggcaccactggttactcctatggccaagtttgatccagaaatagtccttgaattttatgccaatgcttggccaacagaggagggcgtgcgtgacatgagatcctgngttangggtcagtggatcccgttcgatgccgacgctatca

SEQ ID NO: 300407 - DNA, 428 bp, Glycine max
  unsure (1)..(428): unsure at all n locations
agcttcaaaccatatcaacacaaaatctaggtgtccaaaacccctcaatttaatggatttcctaggtttgagaagtgaaattgagaatgaggtaaatttgaagcaaactctcacctcacacaagtccataacatcaatttaaacttgtccaaactggatttacacctaaaatttcaccgattcaaaatttgactcctcaacacccaaatttaccctagaaatggttctttattcactttggtcatttgtttttctctctagctcagcctaacctttctcataaatcctaaatgacatttcaaactaggattaactcattttaaccttcatttactacagaatccagatttaaccttctaactctcaaagcctcactctntntccactcacaacaccacattctctctttctaaccctaggttaactct

SEQ ID NO: 300408 - DNA, 407 bp, Glycine max
  unsure (1)..(407): unsure at all n locations
agcttcatatatttagtgaagagagatgaaggaacttgtggtctaaaagccaggatcttgggctgctgatgtaatttgattgatatccaatttaaccctcaattagttgttcctaattggcctgtgcgctataatgcctaagtgcctatacaagcttaaacaaaggatgttttatggtcttgatacatggatggtttatatttagtggtaagactttaagatgcactatttgataatgcaatggtctctactcttgagcacgatagcagctacctacctaagtatgatccacatattggtaattgtaaaattcanaatattatactaatcctctcattttatttgtcactcttgaaatatttctttatcataaactatgtgccagttagaatattatacaaatatta

SEQ ID NO: 300409 - DNA, 429 bp, Glycine max
  unsure (1)..(429): unsure at all n locations
cactcggacccgggatcttaagcactgagctcagctttttttatgccctgatcgactcgagtaagtatacataaattctagagcttcgttgttaattccgtgcgtctcgatatattatgtgcctgaatcggacctctgagctaaaagttatgaccatttgaatttctcgagagccttccgttgtcaatttcatgcgtctcgatatattatatgcctgaatcggacctccgagttaaaagttatgaccatttgaatntcttgagagcttccgttggtcaatttcgagcgtctcgatatattatgtgcctgaatcgaacctccgagtgactatgtatgaccattngaattgctcaacagcttccattggtcaatctggagcgtctcgatatattatgcgcctgaatcggacctccgagtaaaacgtatgac

SEQ ID NO: 300410 - DNA, 310 bp, Glycine max
agcttctcatatgtgtttgcacctaaatcggtcatccgagttagaagttatgaccatctgattttctcccgccgtttcttttctcaattccgagcgtctcgatatattatgcacctgaatctgacctccgagagacaagttatgactcatgcgaattgctcatgagcttccattgttcaatctcgagcgtgtcgatatattatgcgcctgaatcggacctccgacttaagagatatgaccttctcataactcgatagctcccgccgttcaatttctaacgtctcgacatattttgcgctcgaatcggaca

SEQ ID NO: 300411 - DNA, 309 bp, Glycine max
  unsure (1)..(309): unsure at all n locations
ttgcattgaattactgccttctcctttattatatctttttctgggcttcagtaatacttatctgctttataggagtcgatctccaagaagttgacccatttcctttaatatactaccagcttctattacattctctccttgttccaaaaacagtcaaaattactgacacatgttaagaggcagacaaaacttggtttataatgcgtgtcactcaatgctgggatctttcttgattacaatacttcacgttctgaataatatcttatatcatttctgaatatatgcgagattntattctttgaaatcaca

SEQ ID NO: 300412 - DNA, 388 bp, Glycine max
  unsure (1)..(388): unsure at all n locations
agctttctgtctcatgaggaatgccttgcgcttagatagcatgaaaaagcccttcgataatatgtatgtatgtaaatatgtagcatgaaatgccttgcaaaatgttgaataaaatgccttgcaaaatatgaatatatatagcaggaaaatgccttccataatatgaatatatatagcatgaagtgccttacaaaatgcttggatgggtagcgtaaaagtgtttttcaaaatatgtgtatttgtgagtacgtagcaaaagaagccttccaaaaaatgtgtatatatataggatgtagcatgaaaaggtttgtcaaanaatatgcacatggatatgtgtcgtacaatgcttctcacaaaattattatgtgtgcaaatgcgtatgtgtcat

SEQ ID NO: 300413 - DNA, 425 bp, Glycine max
  unsure (1)..(425): unsure at all n locations
agcttcatatagttagtgaagagagatgaaggaacttctggtctaaaagccaggatcttgggctgctgatgtaatttgattgatatccaatttaaccctcaattagttgttcctaattggcctgtgcgctataatgcctaagtgcctatacaagcttaaacaaaggatgttttatggtcttgatacatggatggtttatatttagtggtaagactttaagatgcactatttgataatgcaatggtctctactcttgagcacgatagcagctacctacctaagtatgatccacatattggtaattgtaaaattcanaatattatactaatcctctcattttatttgtcacttttgaaatatttctttatcataaactatntgccatntagaatattatnaaaatattaatcactttctcttaataa

SEQ ID NO: 300414 - DNA, 399 bp, Glycine max
  unsure (1)..(399): unsure at all n locations
atcttctgtataaagtgatgaggtacaagccctaaaggcaaagcttgaaagagcccgggtagtcaaagagaagttcaagtccatagccatcaaagtctgaagagagtatgatgaactaagggacgtcaatatggccaccgatgaagccttggaatgagaaaccaagaaggcccgaaaggaagaacacgaccaaaacaagttttgaagggctttatagggcagcaatagtgagctcaggctccgaagaggtgaaaggaatcatcacgggtcanaggcatgatcttgaagaacgagctanaggcttgccttangtcgaanagaaatttgtcccaacagttaagcaagactgaagggaatatgtgggccatcatcgatgagtgcaaagagaagctaaatcta

SEQ ID NO: 300415 - DNA, 422 bp, Glycine max
  unsure (1)..(422): unsure at all n locations
agctntgattgtttcgtggattaataatgatttgagcttctgccaaatggtcttgttgttgatttcgcttgatggttaaactttgatgcttgctttggactcttggaagaagattgagaaagctgaagtaggtcaaagatttctagaagtttctgttttggccgatgtacttccggcatgtttagctatattctaagttttcaaactttattttcatttcctttgatgttgatgtattgtctttttcaagctggaagtgttttgcggtggatattagagatacaaattagtttagttgttagttattagtttaaattgttacaatctagtttagcttattacaatttaatttaattagttacaaattagtttagttaattacaagtttagctatataagactcaatgtattcatgtaaaaat

SEQ ID NO: 300416 - DNA, 412 bp, Glycine max
  unsure (1)..(412): unsure at all n locations
tgttttgtttattatggggtacccatcacatgtggtactaggtggcggacgggcgatggtgcacaacaagttttccacatccacaaatcgcgcataaatccaccatcccctgttgcccacctccaactgagctcacgtactcccacgtagcccatatcctcgtttatctcaaccccgtgtccccatcaatccttccaagcttccccaacatccaggtaattcatcatccaaatcatcacaaactaaaaaatcaagcaaaatatggcaaatgcagaaaactctgccccatactcaaaccaaaatcacagctgtttctcacttanagaccgcagtaacatttccttcgttccaattggttaacacgatggattgactcgaacaatttactggaagtctctagtacataagtcta

SEQ ID NO: 300417 - DNA, 366 bp, Glycine max
ttgcttgttctttatgccccacagggaatcaacatcgcatgaagtgtcaaccatagggggtgaaaagaggtggaagccgatgccaacacagtggagttaaagaaaaaggaggcggcatcataggagcactcatggtcaccacaccgacactcagcaaggatgtagcgacggtgaacgaaggagacacaataggactagccaaagcagctggcgcatcaacttcagtagtaggagtggcctcctgaacaagcacaacaagaggaggtggaggagtaggagtaacaacaacaacaacagcgaaagcaaaagcctcaacggatcttgcaaacttgaagggtgacctgaatcaagcgtcaaccctacagc

SEQ ID NO: 300418 - DNA, 398 bp, Glycine max
  unsure (1)..(398): unsure at all n locations
agcttggaattgtatttgggcacctattttgaatctcctatgatgtacctacatataagaaacagtcccactctcccaattttacacaatcatattcatacatcattggggcatttcaccgagcacttggtgagcacatgtttggacataaattgcaagaggatggggacaatgtggcatgccccattgcttcagaatacagcataggcctaaggccttctcattcaaatcctcaattcaagaaaacaagcataaaaaaaaaccaaaactgccccacaaatacaagcacattctctcaatttggagcaccaaaagatgaagaanatataccaatgggaagctganaacatcaaggattgaatacttacttgttggagtggacaataacaccaaaaatg

SEQ ID NO: 300419 - DNA, 334 bp, Glycine max
agcttgccttgtccggtgtagcagtgatgatggcccgagttatgttgcggaacggttacgaacccggaatgggtttaggcaaagacaacggcggcataactagcctgataaatgccaaaggaaattgtgggaagtatgggttaggctataagcccactcaggcagatatcaagagaagcatcgcgggaaggaagagcggtagtcaaagctcgcggttgagacaagaaggtgaaggaagcccaccctgccacataagtaggagctttataagcgcaggtctgggggacgaatgtcaagtggtcgcgatatacgaagatgatgttccgagtacatt

SEQ ID NO: 300420 - DNA, 423 bp, Glycine max
  unsure (1)..(423): unsure at all n locations
agcttgagatcttactttttaaacttatttataaaaaatattattttttacttattaaatatatgttgaaagtatttgttatataatgttatattaaaggatgaaattaaaataaagagaaaaataaatagatatttgtacttgaaaatgatataatataatctttttaaaaatttattttattgaatatattttttctcttttatattattattattagttaaggttaaatcatttggataatatgtgagttgaattcttgacataaatcattcttaatcagattntatttatttttttctaatgaatcggagaattaacacaaaaataaataaataataataataataataataataataataataataataataataatattattattattattattattattattattattattattat

SEQ ID NO: 300421 - DNA, 427 bp, Glycine max
  unsure (1)..(427): unsure at all n locations
agcttgtgtttgttgatataataatttcctctgacctaatattacatagaaggaaaaaaatagagatggatattcaatatatagatagaagaaaagaaaacacaatcattttctactttctagtttttctaccaagctagtaaaatggaattgtttcaatccacatctttcatagaaacaaactaaatttgtcactcagtcaatagtaaagaggatacaaagtataatttaattgatgacattgtcatactgttagtccttcaaatgtattattattgttgatcacgcaaacttgttcatcaagtggttccacaacacctcgactatcatcatggagaatacgccttgagtagtaaacattgtgttaatactttgtttgcaataaaataatattgaattagcattaataaaagagagctngaatacc

SEQ ID NO: 300422 - DNA, 427 bp, Glycine max
  unsure (1)..(427): unsure at all n locations
agctnttattctctttnttactaaatgttagcaaaaaaatattgataaagatcacatgtatggtagtgttatatatatatatatatataccttaatcccaactaggttttcaccaaagcagctaaccttggtcaacccgcataccaaatagtattaaaaagtgaaaaatataagaagagtattacaaactaaatcaaatcaatgaaatctataactaggaagacaacatctatcttgaaataagaaaagaaggagtaagatcccaccaactaaaacccanagtaataagcccgtgctttgctaatttgtttgcacaagtgtagccttcacaatacacatgggagacaacaagattcatgctatgagcaagatgaacacaattcctctaatgtgtacttaactaccaaggaataacatcatcatgatc

SEQ ID NO: 300423 - DNA, 427 bp, Glycine max
  unsure (1)..(427): unsure at all n locations
agcnatacgttacactgaatcaattcatgcaaaggtgcatgttcaactataggagcacaaattcatccatcaagaacctagagatacaaatgggacaattagccaaacaaatggctaaaagacccactaacaactttagatccaacaccgagaaaaattccaaagagtagtgtaaggtaattttcactaggagggaaagtgctaagaacgaaaagagaattgaggaggatgtgcatgatgatgaacgagaaaagaaagaagagggagaaaaagatcagagcaatgaaagtggtgatgaggtctcaaccactaacaccaagaccaagagccagttagcttatgaggctagaagagaaatactctcaacctcatcataagagacatcgtaccctctcgtgccatcaaagaaggataacgaacactattt

SEQ ID NO: 300424 - DNA, 417 bp, Glycine max
gcttttttattattaaaaacaaaattgcttaatgctgaatgttcatgtatcttctttaattgaacaaagcataataaaggcaaggcagaggtattatgtggctctgataccaaatgtaaaattatacatatattgatctaaacatgcaaatcaatttaaatgacatatttatatcaaacagcggagattaaatatattacgagcgtacctccagccattgcaaattgaacgggaagcggcgaacacacgaacctgaaagacagttctgttcttccagacccttactcattctaaatagatggtgtattttttttctgaatagaggagtgagtttggtgatacaaaactgagagcaccacatcctatcctatttatagtgtctgatcatcacagagctttcaacttcttggtatgata

SEQ ID NO: 300425 - DNA, 413 bp, Glycine max
agcttgaatcatttctgtatgcattggataactgggcgacccatctggccttgaatcacacattcgcacctgtctcaagggtttgtggtttgtgctcctctgctgaccaccatacagacctttgaccttccatgcagcaacctgtagcaatcgaacagcctgaagcttatgctgcaaatatttacaatagacctgctcaacctcagcaacaaaatcaaccacagcacaacaattatgaccttcccagcaacagatacaaccctggatggaggaatcaccctaacctcagatggtacattcctgagcaacaacagcagccagctctttccttacataatgctgttggcccaagcagaccatacattcctacatcaatgcaacaacagcaactactctaataactagcaacaact

SEQ ID NO: 300426 - DNA, 320 bp, Glycine max
  unsure (1)..(320): unsure at all n locations
ccaccaattaagtggtgaacaacttaatttgtgtaggaaaaaaatctgtgtccaccactaanattcaagaatgtcaaacttctttntggctgtttccatatctctgttccacatttatgagttttgtctaatattcaagaatctcanacaccttgcttccattgcaaccttanaacatntacttanagacataagctgagccaaatttcttacctacaaatactatgaccaacttcatgatatgccactaaactntngatctacccatctgtcatcagtgttcctttcattccatccataatcctatcagtagaatcatc

SEQ ID NO: 300427 - DNA, 427 bp, Glycine max
  unsure (1)..(427): unsure at all n locations
agcttgtgtttgttgatataataatttcctctgacctaatattacatagaaggaaaaaaatagagatggatattcaatatatagatagaagaaaagaaaacacaatcattttctactttctagtttttctaccaagctagtaaaatggaattgtttcaatccacatctttcatagaaacaaactaaatttgtcactcagtcaatagtaaagaggatacaaagtataatttaattgatgacattgtcatactgttagtccttcaaatgtattattattgttgatcacgcaaacttgttcatcaagtggttccccaacacctcgactatcatcatggagaatacgccttgagtagtaaacattgtgttaatactntgtttgcaataaaataatattgaattagcattaataaaagagagcttgaatacc

SEQ ID NO: 300428 - DNA, 373 bp, Glycine max
ttgcttgctctaaatttacattgatgtttgtatttatgggaggaggttgtatgtcatttttgttttaagagtagtgtcccactggtaaaactaactttccaaatgtttgccttcgcaggaaatggccccgaggaagcttgcctcaaagaggtccaggaaggacaaggcagccgaaggagctagttccgctccggagtatgatagtcaccgctttaggagtgctgtacaccagcagcgcttcgaggccatcaagggatggtcgtttctccgggagcgacgcgtccagctcagggacgacgagtatactgatttccaggaggaaatatggcgccggcggtgggcatcactggttactcccatggccaagtttgat

SEQ ID NO: 300429 - DNA, 344 bp, Glycine max
  unsure (1)..(344): unsure at all n locations
gatcacatgaacggccgttccatctatatatatatatagtaccttaatccccactaggtgctctccaacgctgcttaccttggtcaacccgcataccaaatagtattatatagtgaataatataagatgagtatttcaaactaaatcaaatcaatgaaatctattactatgaatacaacatctatctttgaatacgaaataaacgagtaagatcccacccactaataccctaagtaataagcccgtgctttgcttatttggttgcacaagtgtagccttcaccattcacatgggagacaaccagattcatgctctgatcaagatgaacactattnctcttatgt

SEQ ID NO: 300430 - DNA, 104 bp, Glycine max
  unsure (1)..(104): unsure at all n locations
accctgtataacgggacagcacacgttctcaactgngttccctattcccacatgcaccaaccctccaagcacatccaagcaaagccccaattttagggcatcaa

SEQ ID NO: 300431 - DNA, 357 bp, Glycine max
agcttgagatgaggaagtgttgaagggtgaaacttcctgcttttattgttgaccacagagtggtacctggagatatgtcgcgggggtcaagagaccttggggacgtcaggtggggtgctattgcccaaaaccaagcttgaccaatcccgacccaacccgggcatagtcggtcagtgagaacctgtgatgtacctaagcaagcgagctcctggcagtcaacagataaaaggaaaacaagaccacaaagcaaggaggcttgtggtggctggccagctgtgaattttgtgtaatatgtggattgtggcctctggtaatcgattaccaagggtgggtaatcgattacaaggcttaaaaatg

SEQ ID NO: 300432 - DNA, 360 bp, Glycine max
gcatatagtacatgtcagctcatcttctggacctccggtacctgcctctgttcctccagattcttgtttaacctgatagaacattaaataaagaaactaaaaaccgttcccattccaagaataagaaagtagggaagccatcaagtgggggcaatttctgcccagatttataaaaaaaagagtataaaatagtcactttatttaattacacaaggacaccattatcatcatgcattaaaagaatcatatatatttgttttcttcaaaagcacatcaatgaagaggacatcacgatcacataagggctaattaccagatatttttcaacctatatcccaggggattgcctataatacttat

SEQ ID NO: 300433 - DNA, 383 bp, Glycine max
  unsure (1)..(383): unsure at all n locations
agctntggttcagtagttaaccaagtttcacatcccacaacttctccccgtagaataaaacataaacacacacacaatggaagtacctaaagtttaacaaaagccaaccacaaattattaatttgatcaaatgaaagaattcaataaaagcattgcagaatttttaaaatcttttgcattctcattctcctgcgacagaatatgcagaaaaatgatttggttgggcaagcagtgtgtaacaccctgaaatgttattaattataattcgatgcttgattgtgtttagcttgttgtttgaatatatgtttgactntaatggtttgaaatatgactagaattagtcatgtgtgaatttcttaatgtggatgtggacttatgtggag

SEQ ID NO: 300434 - DNA, 264 bp, Glycine max
  unsure (1)..(264): unsure at all n locations
agctntgtctctactaaaaaaaaacatatgggtccgtcactgcaacaaatggatggcttaaaacatagaaaccaccaaaacaagttgtttaagaaaccacgcaacggaagcatagcagaacacgagtgatataccaagtgaaaaccaattcaaatgaatttacgaagctaacacttgaatctatcaaaagcctccaataaactaaatcgaaacgcgaactccaaacaacatcaaaaagcaaaaaaccttcagagactagattct

SEQ ID NO: 300435 - DNA, 406 bp, Glycine max
  unsure (1)..(406): unsure at all n locations
agctttcanattaagttgcctaatgcctaaaatgttttttctgatggtagtggtcctagatgcagggaagaatttctccaagaacaccttcttaaggtcatcccaactgaaaatggacctgcgagcaaggtagtatagccaatcttttgccactccctccagagaatgaggaaaagcctttagaaagatatgatcttcttggacatcagggggcttcattgtggaacaaacaatatggaaccccttaagatgcttatgaggatcttcacctgcaagaccatgaaacttaggcaacagatgtattagtccagtcttgagaacatatggaacacccttatcangatattgaatgcacaagctctcacaagtganatcaggtgcagccatctccctaagagtcctctca

SEQ ID NO: 300436 - DNA, 421 bp, Glycine max
  unsure (1)..(421): unsure at all n locations
agcttctatataagctgaaccattntatcaataaagacaagttgagttttattcagaaaattagagtttatctcttttatcttagcgagagtgattctcctaaattcttgagtgattcaagaacaccttggctgtatcaaaggactttcacaacctttgtgtgttgccctcgctggaaagagtgattctttccttcctttcatcatcacccttgttctttcaaaccacaattccagaaaatccacctctgcccagaattatctcgtggccataactccaattntaagcactcaaattaagtgattcttgagcctaaattgaatttcaaaacgagacctttcacctcgttntggaatcacctcattnggagccctgtagcttcagttattgccatttctatatttctgtccagccaccactt

SEQ ID NO: 300437 - DNA, 236 bp, Glycine max
ttgttcttattcagtctcagcatcatatttcattcatagggtcatgctaatggatttaatgaatggaataacaatgaagagataatctactaatacaacttatatctaaagtactaaaacaatgatgtagctgcatgaaaaccagaccttctgtcacctacacatatatgacactagacaaccaagtcgtgctaggtgattgttacgtagatgatctgtcacattatgaagacaac

SEQ ID NO: 300438 - DNA, 393 bp, Glycine max
agcttcattctgccatcatattcattgatgaagtagacagttttttgggtcagcgtcgtggaacagatcacgaggctatgttaaacatgaaaactgaattcatggctctgtgggatggatttacaacagatcgtaagtttaacagttatcatattttattttgttgcataaatattgaaaataagttgcaaataagataatgacaattttgatagagatttagttggtaacataatgttctcaatttatttatatttgagtagatttgttgattggggtgacttattgtgtgtgtagagaatgctcaagttatggttcttgcagcaactaatcgtccttcagaacttgatgaagcaatacttcggcgtcttcctcaagcctttgaaattggaa

SEQ ID NO: 300439 - DNA, 428 bp, Glycine max
  unsure (1)..(428): unsure at all n locations
agctntacttcttatgccactctactccaaattcttgaaggatatgttaacaaggaaacataagtatattcaccaggaaaacatcgtagtggaaggaaattgtagtgctgtgattcaatagatccttccacccaagcataaagaccctgngagtgtaactattccttattcaattggagaagtcactgtgggaaaggctcttattgacctgngagccaacattaatttaatgccactctccatgtgtagaaggttgggagagttggagatcatgcccactangatgactntacaacttgttgatcgctccattaccagaccatatggagtaattgaagatgtgctggtcagagtgaaacattntatcttcccggcagactntgtagtaatggatatctgtgaagatactgacattcctgtaatattgg

SEQ ID NO: 300440 - DNA, 392 bp, Glycine max
  unsure (1)..(392): unsure at all n locations
accacnacagagaaggagcgcaccttgaagcttcaccacctcatacaataatgtgttccacgaagtcactaccacactctaccttgtgctaagattctcacatgaccgctcatttatctctatatatgacactctctaccgcatcaggtgcgcatacaccatctctcatggaccaactatggctaaaaagctcaaacatctcttcactgccagagagcgcctctgacgtttcacagcctcctggcaatttgtaacttcatcgcgctcgtcttggaatgaagaacatgagatacataggaggaacgccgtggacatctacagatagnaaacacgtcactcgatatacttttcaatgagaggagagcgcgtattattaaaggtaactgttgacg

SEQ ID NO: 300441 - DNA, 421 bp, Glycine max
agcttatatttattgtagggagaataaaacaatccaaaatcaattgtacctttcaagtaacgaagaattctttttgcggcttttagatgaggagaggtaggagcctccataaagcgacacacaactcccaccgcatatagaatatcgggccttgtattggttagataccttaaactccccacaagactcttgaagatcgtgaagtctaccttctctccttcatcaaactttgataacttcaagccaccttccataggtgtgttcacgggattgcaatcaagcatattaaattacttcaacacttcttttgtgtacctttcttgtgagacaaagataccattctccgttttcttcacttccattcacaagtaatatgacatgagtcccatatctgtcatatcacattcacgagacatggact

SEQ ID NO: 300442 - DNA, 425 bp, Glycine max
  unsure (1)..(425): unsure at all n locations
agcttgccgtccagctcgcccaggcgagcaaggttgcttcctccagaaggaacggcccaagtgggcctggttgctatttacacccccatttttactaaatgcaccccctttctatttttttgtaattctttttccgtaacgttacgaaactttacgaattccgtaacgatacttattttccttctgcaaggttatgaatccttacggattatgtatttactcttttttagctttcgaagaagttacggaaacccccggattgcgcaaaaacacctcttttcgacttccgccacattacggaatttcacggatcgcgcaagcctgcttccttttaatttctgagacgtctcaggacttcatttactgtgcaacanaggatgccaagtatctcanagcggctaaccaaaggttacatgtcatcaagt

SEQ ID NO: 300443 - DNA, 418 bp, Glycine max
  unsure (1)..(418): unsure at all n locations
agcttattctatattactattattggggtatatgtaataacatagcccaaagagtctgcacaagtaaaactaaacggtagttaaccaatttttcgacgaatattaattatcaaaatgaacagtacttcatatctataatataataaaaaaaacaataaataacattaatagtgtgtttcagctttatatcatttcctaactaaaaaagaagcattaggatatctttgagctttaaatttggtggcattagttccgatggttaaatggcaattgtttaatttaaggggcgtgtctagttgaagagtcagtgtgtcaaataatggatgatttgatgaatgaccagatgtactcgagtgcatgacaagatgtgaatgggccatatattgcttgagcagcaacagcaagacannatagtctc

SEQ ID NO: 300444 - DNA, 488 bp, Glycine max
  unsure (1)..(488): unsure at all n locations
ggccctgattgtgcttggtcatttgcaactcatctcgtacccggcatcctctagagtcacctgcntgcatgcangcttgtatctattaatttttngttgnnattgtgaatttacgcatgcaatcttaattctcaacacactgtntggatgagtcttccaaggattgtgttgccttctctaactctccttccttttccagtgataaggtaaagctacaaaattgagtctcccaatttttgatataagttgtgtaagaccatctntaattcgaacaatgtggcttaaaggtgtaaatgcacaatccttccaagcgagcaactcagaggtgtaacgccatcttatgaattcgtatgagcatcttcaatganaatggaagacttgaacgacagtggttggcttgctctcattgttctggaatagatanggatctatatatgncacactgatgaaggatgaacaaactcattatgcatccangtaaacttgat

SEQ ID NO: 300445 - DNA, 426 bp, Glycine max
  unsure (1)..(426): unsure at all n locations
agctttatattntgttcttcgtattcttaatagagtcccttataaaaaaaaaatttaaaaaaaaatctttataagctatggagaaaaagagaaccaaatctgaaatatcttaaagtgtgggggtgtctagtaaaggtcaatatccctattaataagaaaagaaaaattgaaaaaaaatgttaattgtattttgttggatattttttacataatactacttatagattcttagttgttaattcagaagtgactaaaatttataatgttactattatgtaatctagagatatcactttctttgaaaatctttttccttanaaaagaaattgttaaatctttatatggtttgaaacaagccccanagcaatgacacacaagtttgatcaagttattctttcgtatgattntcanattaatgatagtgat

SEQ ID NO: 300446 - DNA, 413 bp, Glycine max
  unsure (1)..(413): unsure at all n locations
agcttacctttgtagttgcttgtagccgtatatctttagttgagacaaaagacaaagaatgtttataaagaaaatgaatattcaataagctttaatctgaaggatatagccaaatgggcagaaattgattattcacagcatactctagctagcatgatttttaaatgggtatgattcataatcattcaaacacaatgtagatagaaccaacaaaagtgtttcacgatctgtgaattttgtatacagccaacaacagctgctagaaatctctgtctgtcctagtattaggcctcgccagattatttgtctgatggctaatatttaccagagccagcttgatggctntaaatcaccccttttcacttgcgaatatttatttggcttctttcatataattaatgtgcacatattat

SEQ ID NO: 300447 - DNA, 411 bp, Glycine max
  unsure (1)..(411): unsure at all n locations
agctntntgactcctgattctttggaacttgcttaactcttgattctttggcatcatcaaaataatcttggaagttattacttccacataattataataataaaccataaagaaaaaagtaacatcaagaatcaacaatgtcaaaagtgtttaaacaggggaatcggtgagagcaacaacttctctagatgacgaatcagaaagattaggaattcctccaattggggaaacaagggggtcagctatttctgtagctggtgaatcaggaggagtagctgcttcatctgatgatgcgtcagaaatgacaatcagaggaggagatggnggaactgcttcaagctcaagcgaagaaggtggattcaccactagagattgtgggttagctggctctgaattgacctgcacaagtgt

SEQ ID NO: 300448 - DNA, 414 bp, Glycine max
ttcttaacttgtaatatagcgtgattttcacgtgaatgacaatctatcttcatgaacctccataaagttaataaattccatgatagaacaagaacaaataaataagcacaagtagaggaacattattctatggacattcatttcattaatacaatgtattggactggatccctaacattgtcatatattttccacaaatcggataattttgtcaaatatttcttcatgcgagtgcacgttaaggtcataaagctctgatgaaatattcaattcacttgaacttgttgaaacaccattaatttcaaagaaccaaggttcagttgctttcatgatcagaacttgctacacaccgtatagttattggtcattgctcagcaagtgctgcactcctgcccaatcatgcctcggtattct

SEQ ID NO: 300449 - DNA, 424 bp, Glycine max
  unsure (1)..(424): unsure at all n locations
agctntgatggactaattntgaaacaaaaagaatctttcagaaactaatttgattggcaaaacttttgaacggttaatgtggtaacgtgtataactntggaggatcaaattgagggtcttctcttttaaacatgaatgtttggtatatccacatttccatcagtgtgatgtgtaagtctaaccaaaagaaatttcccaacagtctaataaaagtggaaaccaccaccaataattgcaaatagttctctcttatcttttgctttcttttccatccccgtaacacaatatattaatgaaacaaaaacaagaaaatccattgcagccattattaagcacttgaaaaagtcacaaacctgaaccataattgacgcanaatccanatcagtttctccttctaatattgtggaaagttcacggtagactc

SEQ ID NO: 300450 - DNA, 393 bp, Glycine max
  unsure (1)..(393): unsure at all n locations
agcttgttttaagcggaagaaaaggaaaccgaaagtgaagagatgaagatgaaagcaagcaaaacaagaaatgaattgaaagcctcgggttcgagcacttacccattgaagaccaaagagcggatgaagaacgacgaanaatcttcatggaatcacccacgaaaatgtcttagaagcgttatggaggcacctcggcttgtattttcttcacagaaacacgttttttcatccaaaacaattcanatgcataacataggggtcaggacccttttactacacctctntgcccttatttatagccaaaacagggaggagcttgccgcccagctcgcccaggcgtgcctaggctttcttaggaagtttcctgatgcaccctcaaaattactaagttca

SEQ ID NO: 300451 - DNA, 424 bp, Glycine max
  unsure (1)..(424): unsure at all n locations
agcttgatgtatatactttttacaaccctatctctcaagtgtcatagcaactagcccttaggtcttcatgttcggtgtatgccttaataaacttataaatttttcagctaaccattctgtagtcacctaccattttctagcagtcctaaagcatatgtattcatctatgaaagacaacctaccaatgagtcttctaattcaacttgctaacccttaacttaaaacgacaccctagcatgaacttcaccacatatctcttcaagtcattttgcacaactttcaaatttttcttattgaccattgcaattgttttcacaacttctttgatatcttttttggtgttaaaaatcagcccactctcaatatgaatatccacatcatccgcaggtattctaaacctagaatatttctntgtctcattctc

SEQ ID NO: 300452 - DNA, 385 bp, Glycine max
  unsure (1)..(385): unsure at all n locations
agctttggttaattttatttactgganaaagctatggggtgcttgttttgggagagtactgcaccaatgctagatccttangcatttgtttccatggtgaaaggtttagagaaattgagtatgcatagcactggggctgagctaactgcctcttgtaacgcgtgaaaggctagcatggcctacggtgaccacacaaggtgttccttggtcaagagatgaatcacaggggttgctatggtagcatattctctgatgaaacatctatcataacctgtgagacccatatatccccacagggttctaaaggaggtgggtcgcggccattgatgaatggcaagtatcttgtcacgaacgggatgaacaccgcgaacggataccacatgac

SEQ ID NO: 300453 - DNA, 417 bp, Glycine max
  unsure (1)..(417): unsure at all n locations
agcttgtgtctatctttctattgtcgaagctgaatacatagctgcaagaagttgttgtgctcaaagtctttggatgaagcaacaatgatgtaagctccattggagcttgtaggcctaggatcttcttcatcaatggattcctttgcttcttggaagatgaatggcagcggaatggagaaaggaagagagagaggagacgccacttcaaggagaagatgagtctagaagaagctcaccaccataggaggccatggataagagcttggaggaagaaggagatgaatgaagggagagggagagaagagcacganattntgtgctctanatgagctttgagatctgaagtttaatattcanatgatcaaagttganaaanatgcacacacatgacctctatntatagcctaagtgtcacac

SEQ ID NO: 300454 - DNA, 403 bp, Glycine max
agcttgctacttctggaagctcctaatatctcccacactttttggggtgggccattcttggatggccttgattttctcagggtccacttggaccccatttctaccaactacaaaacctaagaagactatattatctacacaaaaggtacacttctctatatttgcatagagggtgtttttcctaaggactgaaagaacttgcctaagatgtcctaagtgatcagctaggcttctactgtacactaaaatatcatcaaaataaacaactacaaatctacctatgacatcccttaagacatgatgcataagcctcataaaggtgcttggtgcattagtgagcccaaaaggcatcactagtcattcatacaaaccaaacttggtcttgagagcgatttacactcat

SEQ ID NO: 300455 - DNA, 420 bp, Glycine max
  unsure (1)..(420): unsure at all n locations
agcttgtatcttgaaaacaattattttgttgtgcggtggattagcttcatatactactgcggttttcaaattgattgcaattaccattgaactgaccaataggatatacaaattgatatatggtccaaagctttaaattttattattatttaaatgcacatcagacttatttatggcaaatctttaatcctaaagctgttgaggtttatacccatacacagtgtaacatgttcatgtttgaaacaatgaggatctgccttctatgtaatcttaagaatgttttgattgatctttagaaatgtcatctattgtagattgtagatgctgccttttctttnttctatctctctttttttcgtgttttgtacttccactgccttgtacccttgctacttatntcaatgggttttgtacgactct

SEQ ID NO: 300456 - DNA, 342 bp, Glycine max
agcttctctgaactaatggatcaccatgtctaatgatgattgctgaacaatgaacacccggcgattgtatatttttaatcaaattatacaactcttcgcgaataaactctccaggattacgtagataagaaggcgatggaagagctaaacggtactcaatcattgaaccaacttcttggagggtctcagatagcaaagctagcatctcataatctccatcttcataaatgactactactctatgccaaccataagcatgtactacatctgcaacacattttgcatatgcagtaccatatgtggccattcttaccgaaaaatgccagcgagttgtcatcaatg

SEQ ID NO: 300457 - DNA, 381 bp, Glycine max
  unsure (1)..(381): unsure at all n locations
aagcttctcaaggaggtgagcttactttttatatgggtgtgtttagctaagctctagcttttcaaggaagttttcgcaaacaagcttctcaacgatgttttctcatgaaagcttctcaaggaaactatctactctataaatacaagcatgtgtaacacatgttgtaactttcttgaatgaaagtcttatgagatacaattcacagttccacttntttttccttttattccttcatctcgtgctcccgccttgtatctttcttttcctccattaaagtatcctcttcaagcttcttatccaaagcaattgttggcggtgaagctccttcttccttggctgattccctatggatggtgcccccctttcctttctcttttcttc

SEQ ID NO: 300458 - DNA, 208 bp, Glycine max
actgacctgagctcacatcaaagatgcttttttccatttgagccaaaccctccacatcgtactaccgttcacagttaacctcagtcataacacccacagactattacctgcttttaaatgaatgggggcgagtcagaagcattgacattagagctacatgatccagccaactggtgcctactccccccctccccagcttactaggatt

SEQ ID NO: 300459 - DNA, 570 bp, Glycine max
  unsure (1)..(570): unsure at all n locations
cccgccgcctctcaaagatgtgtaatgaacatgcaacgcgcgaccaccatctcctcctcncagancccccgcgggcggcttgganctgtgttgatcctcttacanacatagacactctcaatctctcaactacgcagcatacacgaaggcgcgaccatatcacctttccatttctcgccacctgagcaactcacatctatcatgtgcgtgacagcaattgaactgcccatggatttattatggggcagggcacacttcggccatcgctcctgatcagggtcgacagacgcgggacgacttgactttcatgtgacgtcaccgccaacctatccatccacatagcggcatnttgatctgccccccccatccccccctcatgcttatttgtaggatacacttgtgcaaaagcaccactagccttcgcctatcggccatcgactggtcaactccctcatcgaacttccggagatcactaccacgccttgcgccgcggatgtcagagtgaactcaactcactatgaacaccggaaagcaacaagggtgttctgcacaaccaaagcctcaggcccg

SEQ ID NO: 300460 - DNA, 383 bp, Glycine max
agcttgtttgatgggggatggctgacgtttcaagaggacagtctgaatgtgaagactaatccactcgccaatcatggaggctcagtggttaatgcaatggaagagtgggagccagaggctgaagtagatgggagacgtgttaacctctagaaggttcattttggaagcactgtgcgaagctggtatgattcgccatgatggtgacaagggagattcctgtttaatgcatctggaggcatcacatgatgtggagacgtgctcaatggacgaatagttgctacaggggatgatggataacggccaaattgaagtctgcagtgcgaaaaaacggagatggatatgtgtatgcagtcagatgataaaaacccaagtaagcccaagtc

SEQ ID NO: 300461 - DNA, 389 bp, Glycine max
agcttcaaaccacaacaacacaaaatcttggtatccaaaacccctcaatttaatggattttcaaggtttgagaagtgaaattgagaatggggtaaatttggagtaaaacctcacctcacacaagtctataacatcaatttaaacttgctcaactggatttacacctaatatttcaccgaatcaaaatttgactcctcaacacccaattttaccctagaaatggctctttgttcactttggccatttgtttttctctcttgcacagcccaaactttctcataagtcctaaatgacatttcaaactaggattaactccctttaacctccaaataccactaaatccagatctggccttccaactctcatagtctcactctgtttgcactcac

SEQ ID NO: 300462 - DNA, 338 bp, Glycine max
gtgagccaaaatcctgactcaccatagaccttgactccaggtgagaatgtcaatccttaccctcggaagcaaaaaagaatagaagggaaatttccaatctaaaaataaaaaatagagaaggaaaattcccaatgaaagagaaaaaagaaaagacaggaaattcccaatcaaagaatgggagaaagcacaaagacaagaaagaacattcccaaccaaagaatgggaaaagtaactaacacaacacaacagctctcggtcaaagaaactagaagaaatgtgcagaaaggtcttttgaccagacaatatctgaacaatacagaattgtcaccaaatgaaca

SEQ ID NO: 300463 - DNA, 380 bp, Glycine max
agctttggaaagtgttgttttcaccttctcgctaagccaatctgatggcttagcgagcgtctgctaagtgcaacattcctgggctaagcgcaaggaagaatccataagaagatgagttgtacaagttcgctaagtgcaccgcttcatcttactaagcgcaccacttcagttcatctgctaagcgagaaaagcgggctaagccaaaaatcactaacgtgcgctaagcggtccataagtgcgctaagcacacgagcacaaacaaggccacctagttaagcctgaaatcagattttgtgaagggagtttggactaggattcagagctttgcatgtctagggtttctagagagagaaagtccaagttctagagagttttgagag

SEQ ID NO: 300464 - DNA, 454 bp, Glycine max
  unsure (1)..(454): unsure at all n locations
ntcatctagccaagattatacaaaggtgctacaaaagaacctaacgattcctaattatatgggccatcaaatctatcatgtgctgacagtaattgattagcccatggatctcctcgggggcagtacacacttccgccatggcttttgctttggctaacagacgcgggaggtcttgactttcatttaaggtcaaggcgaacctatccatccacatagtcgcttcttgatctacgcatccatcccctccctcttgcttctttttcggcatacacttgtgcaaaatccaccactagctattgttcatgggccatggactgcgtcaattcttcattgtattgccccatgatagctaccatgctttgctccagggctctcaagtgttgagccaaactccttcttgacctcgtgcaagcaactaactcttcttttaatatcatgccatgcacccgcgacc

SEQ ID NO: 300465 - DNA, 382 bp, Glycine max
agctttgagcaaattgaaatgacaataactttatacacggatgtccggttgagtcccgtaatatatcgagacgctcaaaatttagatccgaagctctgagaaaattgaattgacaataactttatacacggatgtccggttgagtcccgtaatatatcgagacgctccaaattgaaaacggaaactcttagaaaattcaaacgacaataactttttactcggatgcccgacagagtgtcgtaatatatcgagagacgctccatattgactatgaacgctcgtatcatatgtaaacgacaataactttatactcagatgtctgatagagtcccgtaatatatcgagacgctcaaattttagatccgaagctctgagaaaattg

SEQ ID NO: 300466 - DNA, 405 bp, Glycine max
  unsure (1)..(405): unsure at all n locations
tctagtctctattntgagcgtctcgatatattacccgattcaatcggacatccgagtaaaaagttattgtcgtttgaattccctacgagcttcccttttcaatttggagcgtcttgatctattacaggactcaaccggacatccgtgtataaagttattgtcatttcaattttctcagagcttcggatctaaattttgagcgtctcgatatattacgggactcctcacacatccgctaaaaagttaatgtcttttgaatttgatacgagcttncgttttcaatttggagcatctctcgataaattacgacactctgtcgggcatccaagtaaaaagttattggcgttcgaattctctaagagtttccgttctcaatttggagcgtctcgatatattacgggactc

SEQ ID NO: 300467 - DNA, 353 bp, Glycine max
agcttggcatagcgtgtgaagagatggcgcttagtgcaaggtttacgcttaacggataagcaatctgaaaatttttctaagtcattttctgcttatctcttcacacataatttaaaaaccatttttgttcattactaaacaagctgaaattaatcacaatcacaagcaagatgtcctaactacatgcaagaaataaaaatgaagatagagaagggaaagaaaaactgggttgcctcccagtaagcgcttctttaacgtcactagcttgacgcatcatcctgttatccaggatccaataatgttcccacttcaaggaccttcttctcaggacttctatcctctatcacatgaac

SEQ ID NO: 300468 - DNA, 445 bp, Glycine max
  unsure (1)..(445): unsure at all n locations
cttgtgacaacttcatgtgctactcaatgttctgaataactttttactacttatcttgattgactcttttcttgagtcttgagtcttgatcttgattattcttgattcttgattcttgaaacttgaaacttgattcttgaattgttcttgactcaatcttgaagtcattctcttgngctttttgtcatcatctgtgttatcatcaaaacaccttgaatcaatcgcgacctatcatctgaatcaatcttgattcatgactcaatcttgattcaatcatgaagcttgcttctgcacttatgcgtcatgtcttagaggatctcataggtagatttgtagttgtctattttgatgatattttagtgtacagtacgagcctagatgatcacttacgacatntcatgccagttctttcagtccttangaaaaacactctctatgcaaatat

SEQ ID NO: 300469 - DNA, 399 bp, Glycine max
agcttcaagcaaggcttcatggtgaatgtgattcaaaggtgtttcgatgataacaatgatgacaacaaaagatgatgactaaggtgatgaacaaaaagctcaaagatcaaagaaaaacttaagtgaatcaaagaacatctcaagtgaatcaagaataaagattcaagattcaaaatctcaagaatcaagatcaagattcaagactcaagatttaagaatgaagaaaagactcaatcaagataagtattaaaaagttttttcaaaactctgaatagcacatgagtttttgacaaaacctttaccaaagagtttttactctctggtaattgattaccatattggtgtaatcgattaccagtatcaaaatgagtttgaaaaagttttcaaactgagtttaca

SEQ ID NO: 300470 - DNA, 428 bp, Glycine max
gctactgatgtggcagggcgggcttacttcactttcttgtctgcaacgctagctctgaccactgatcttccttcccgcgatgcttctattcatgtccgtctgagtgggcttatagcctaaaccatactttccacgatttgcttgggtatttatcacgctagttatgccgccgttgtctttgcctaaacccatcccgggttcataaccgttccccaacataactcgggccatgactccgctgcatcgacagacaatgctgcccaaagagggagtccacggacgaaatgctgaccacctcagaagactggaaagcggcttctaacgattcttgtgcggcttccacataacgcatggaggatgggcagcttaccaagatatctatctcgcctgacacgatgaccaagtgctcctccactacgaatttcaac

SEQ ID NO: 300471 - DNA, 398 bp, Glycine max
  unsure (1)..(398): unsure at all n locations
agcttgtacatcagtatagacaactatgctgcattatatatattctgatatcactatcctggattatacacaactatgctggacttcgagtagctagatttggttggacttggacttctctttatttgttacctaattatagacaactatcactatcctactctcttggtacacaatacaagttgttaccaaaagaaaaagaaaaatggttgttagggagtataattgttttccaatggtagtcattatatgccctttgaatgccaatactaaaagcaaagtcatgacattgggcttatactttttacagaggaacctaaacatggttggcatcatggtgttgccatagtttttgccattntactactggttgcagganattcagtagcaaacttttg

SEQ ID NO: 300472 - DNA, 453 bp, Glycine max
ctaccagacagatcagccaaaagtgctcgagctggcccctacaaattaaattgaagaaataaaggggaatttagttttcagctgcacaactgaatcagtatgaagttaatataacagaagcacatgtcaattactttaacaagcttacctgcactgtgttgttagcaaggtccagcatccagaacccaagaataaatacaagagcagcccttgttcgggtccctttaaatgttcttaatttcagacagaatttcattaatgtctaactaaggtcatcatatctgtgaattttaaaaagacagaaataaaatgagtaacgaaataacgaaaggatgagataagaaacctgcaatgctcgtgtgtatcacctaatacatatccaatgtctgcagaacatccgattaatatcacctacattacaagacttgacttaccatatgtgtaatgtagcat

SEQ ID NO: 300473 - DNA, 375 bp, Glycine max
agcttgtgatctattacacaagtcttgtaatcgattaccagaggagattttcagaaaataatttccaagagtcacatctattcaaatggtttatgaatggccatcaaaggtgacttggaaacacgaatttaaagagagttttcattgcccacaaagtttatcctctcaaaagattaagagtttttctgaactgaactgtcttatcctctcaaaaagattccttggtcaaccacttgcatattcaataaggaattttgattggtcttcattgtacaatctatcccttttaagagagatttcttcttctcttcttcttacttctgaaaagggattaagagactgagagtctcttattgtagaggattcttgaacaca

SEQ ID NO: 300474 - DNA, 458 bp, Glycine max
  unsure (1)..(458): unsure at all n locations
tgtgcaaatcaagtcactcccgcattntatctctagcatgcattgtatgttggtctcgtcctttgtcacgggaagccggaaggtccatatcaccttcttaattgtacatatggggcactgcgcccccaaatgcgcgagtaagaagagataattttccgggctctcgtgtccgtaaaatgcattcatatcatgcaccgcataaacatctcttcagcatcataatgaacatatcgtcctgcatttgtcgttatcacattcccattttgcatgagtcattgcatcatcatatgcgttcaacatactttttgtttgctcatacataatccttgtattttcctctacaaaacaaaaacaaaaaaaagggaagtacaaaaattcacgcagcattcttagttgcatatattccgtaccatgagccaaccatgttgggatcataaacccatttcacaacacaacaa

SEQ ID NO: 300475 - DNA, 393 bp, Glycine max
agcttatgcccactcagtggaggacaattgctctaatttttttgccatacccctatttttcaatacaggtaaaagaattgttgtaggtacatgaggcaatttgtggtagtaaattgaagtgaatgaagtctcagaaaattcgtattgagtcggatttcttagaaaacaaataattgaataacaagaactcgtatatcatatggctattattggattcctaaaaaaataaaaaaatatatagagataaaagcttctcggaataatttatttaaatttataatcacggtatatttgatttacgtaaaagttgaaatatataaattagaaaatataattacagagagaatgtacgaatttaactcaagatatttaatgtgtattttttcatttata

SEQ ID NO: 300476 - DNA, 456 bp, Glycine max
ctaacaacttccaattgactatcttcattctagaaaaacaacttttgataaactatcgaagtcacaacaccaattccatggatccattccttgcctaaaaaattattgaaactggcttgtgaaggaataaccacaaagatagttggcctcctcaaacttccaacaaaaacttctagtgctatcatcccatcaattgctccttatacttagtaaggaggatcaaaatcgttctagcatatcttctaaaaatcatcaaaaccagatttaaaagtatcaatcaccatttcttctacagtttcatgcattggttttgagtgattctttagaatttgaatccttgcttttgttgattgctctgttgattctccaaagccaacttcctcaccctttggttacgcctccattgagttttgttcatgtttttgaaccttgaagcactatagtaagccatccttg

SEQ ID NO: 300477 - DNA, 399 bp, Glycine max
tcctctatactctagacggcagcttgcagccttcagtcttgattcctgtggacgacctggaggctgtgagagctatattgggtgtcgcattgcctacccatccggatatgcttgagcactgatactctgccatcgaatataaaacatctgcggagtgctaaagacagaatgacttaccaccaaaagtatgacatcaaacgactgtctccttaggatgaaagtgatactccatttttgcttatgatgcggaatataccaaggaagttcacgtatcttgagaagatattcacctcaatacttgattaaggattgattgattctagaggtgggcaaaatcggtgctgaattggttaatgtaagagtcgtgaccaatgtcctaatatactagctcacagatct

SEQ ID NO: 300478 - DNA, 514 bp, Glycine max
  unsure (1)..(514): unsure at all n locations
acggtccccccggcgccncccgcttttgaccctttagttagnatccganctccttgcacgatacacctcgacaacttcagtctggagctggataagtgctctggcatacttttgttcagattattgatcaaactagatgggcgtgtattcttggcgattacctggcgcgccatagtnatctaccatttgttcatatgctgtcactgatgtcggcatctaattataccttttggatgtggaaagctgttataagtcgtaaacctatatccacacaccgccattatgttaatcctactttgatcatacgccctcccgctccctgacctcgcatggaatgacatttatacgaacgtgtgtcctcgaccctagtatggtggatagagacatgtcctttcggatgctgcattgatcacattcttgcttaaagcgcatgtcacttgttaccattagtatttagtacctcatagaacccctccgtagtgcctatagtaccacttgaccctagagacttacn

SEQ ID NO: 300479 - DNA, 391 bp, Glycine max
agcttggaaggaaacaccactatcgttgtgaacaatggatccatttggaaaaataaaacctaatgtggagttcacaactgtctgactgcttgtctctcccaagaatgccatagttttttgtaagacttgggttgatactgaaacttgtgctttcttacaaggttaggttgtgccatatatatagatgagttttaatatcagtgttgtattttttaaagattgaaaatacgtatgcacatgctttctgtatgtgttgtcaactacacgaatgacatgacatgctttagcttgcatcagatttgcatatgtagtcatgctgtgtacggtcctttcacgcgttttatgttaatgcagacaacaatttatcatacacgattttccacaatgtgta

SEQ ID NO: 300480 - DNA, 443 bp, Glycine max
  unsure (1)..(443): unsure at all n locations
taaagataaactaagaataatgatagaatatcttattttatattctgataatatattctatcaaatataaactgattagttaggctaacaatactgataaaatatcttatcatatataaattctatcacactcccgcagtcgaagcgagaggtcgatgaacacgaacactatgactgtctcgaactggacccgggaccatggccactaattttttatttttttcagaaccttgtaatatcagacnggcttccccgttgttgttggtctgaatgagaganatttgagtcataaatggattatgaggtagccaccattgccgatccggcttcctcaagtatgagcatcaaccgagcctgataaaacgaaggttgatgatcactctgctgaattaacatccttacacctcgatatgcacttgtgagacccgaaacaagttgaatga

SEQ ID NO: 300481 - DNA, 389 bp, Glycine max
agcttagataccaccagcatcaaggaattagggcggttgatggaagctctccaaatgcaagctttcggcaagacttatggaaagatcttagaattgaccttagcagaggtatccatagaagccattgcatcactcacccaatactacgaccagcctttgagatgcttcacattcggagacttccaattagtaccaaccattgaagaatttgaggaaattctaggatgtcctctcgggggaagaaaaccatatctttcatccgggtgtctcccctctttgagcagaattgcaactgtggtcaaggattcagcaagaggtttggacagcataaaacagactcggaacggcatggcgggcctaccacggaggtacctagaagacaaggcgag

SEQ ID NO: 300482 - DNA, 440 bp, Glycine max
  unsure (1)..(440): unsure at all n locations
tgagagactgttggcatgttcggcacttccccatgccatatccattntgtataattcggaacgatcccctcacatataagatgagatcttatgtcatttactacttggcgtctcccgtttccacatttgacacatggatagaaaaatttcccccgcaaagatggtgcattacatttagtaaattataggaattcttcaacaccattctcatattctttagttatacattcgctttcatccagtttgatccatgtttcccctttgatgtgacacttgattaagttatctgacatgcatganaacctcactttnttaattaaaggtgtggccctatcccattcaggaagacattgtttagagtagatttataataattatattttgttaattctgactaaatttcgatagcaattcgcattggtctccaagtacactacatg

SEQ ID NO: 300483 - DNA, 392 bp, Glycine max
agctttcacttgagtcatcaagagattataaatatgtgaccgtggcacgaatttcaacaacaaatgatgaatcatctttgaatcatctatctttcaatctttacaacatcatccctcaacatctttcaatcaatctttcaatatctttctacagaattttctgattcatttctcttcatcttctaaaagtttttgatcaacactttctcttccaagaaaagttctttgttcaaaaacttgtgctattcatctttttcattcacttctccctttgccaaaagaacgaaggactaaccgcctgaattcttttgtgtctctcttctcccttacaaaagattcaaaggactaaccgcctaagaattcttttgattcttcccttacccttaagcaaa

SEQ ID NO: 300484 - DNA, 451 bp, Glycine max
  unsure (1)..(451): unsure at all n locations
tctagccaaatggacttaccttgaattaattcctttgatagcccttttgagccttgtttccctttccttgttttgaagctcactacaagccttaaatgaaaaaccatgatatcaccatatctttaaggaattttggagctttggaattgttttgggaataagtgtggggggtttttttgtttcattggataacttgttttgttggctatgcttcgtgatgtattttgcgcatacttgatgacattgtatattggttaaatgttggacatgctgaatgaaatgttgtttctcaaaggctataaaaaaaaattcgaacaagaagaagaagaagacaagcaataaagttgagtgaataagatcttanatggcacaagaatgatgaaactcttggttctactctttatgtntacattttatctttacttctttctattttcttattcttctctta

SEQ ID NO: 300485 - DNA, 299 bp, Glycine max
tgcttgctgatcatttgacgccagcgatgacaagaggacagggcgtgtattgaacttagcctaagccttgtctaggaagaaggatttgcgcccactgtgcatgcttacatttcacatcgaaattgccaccaagtccaacagcgtgcgacatactaggattcccattctggataaggagcgctcccgagaatgaatggccccccgtcggatcctgatacctcaactgtgagagatctgcaagttgcttatggagttccccttctagatcattatcacttagatcatgatattgacaatga

SEQ ID NO: 300486 - DNA, 430 bp, Glycine max
  unsure (1)..(430): unsure at all n locations
tgcaagtatgtgtggtggcacctgtctgctgccttttatttctcttacttttgctcctatcgattctttcatgtagtctaactttaagtatacatagagatcttacttttggtgatataggatcttttaatatagtccaactttcacttttcacattgcagctttcgaccttacacatctaactattgatactctagctaatattagttgagcctctgcgatcgaccccaacgagaatcatactcattgtacatggtttgagaccatgagtccataaactaatactgaggaaagcattgcatcatagtgcatgttttgagaccatgagctcaaccctacctatacgtctaactacatgaccacatgagcgaactcaganattagtatatcctatattattatcatcatgcgctacatgacaaaagagaat

SEQ ID NO: 300487 - DNA, 389 bp, Glycine max
agcttgatttctggtaaatgaccttgatgttgttagattcatattggatgtggctttaccaaccaaccagtttaaacttgaacactaatactttgtcatcaaatatagtattactgtggactgcaaaatcggaaggagctaaagcagaagaaagatgaaatcaaaagaaaatctccttaagaataaagttaaactccattattgcttatgatacaaaatatacaaaggaagttcacgtaacttgggaagatattcaccttaatacttgattaagtatttatttattttaaagttgggtaaaattggttttgaattgttaaatgtaagagtcttgaccaatgtcctaatatacaagttaagagatcaacaatagaaagcttttattgaaa

SEQ ID NO: 300488 - DNA, 414 bp, Glycine max
  unsure (1)..(414): unsure at all n locations
tcgtattntagtatgattgttacaagttatactcacatttacattgctaaaataaattgaggtacttatatctatttgtggttttaatggtgtgagtgagataaattatttgtacatatgctgtcaatgatgttggcatctacttccaccttttggatgtggagatttattataaattgtaaacctatatccacaattcgacattaggttaattttaccttgatcaaactttttgctctctgtgtattggctggagtgcccaaattttcaaaaatgtatctctgaccctattataatggattgagaaatagtttttttgtcatgctgagattggatagctttcttgcatttagaacctctggcactttgttttctattaatttatttagttattttgaaagatcccccttcgta

SEQ ID NO: 300489 - DNA, 323 bp, Glycine max
agcttgaaggcaaactggatgcattggttaacttggtaacccagctggccttgaatcagaaatctgtacctgtcgcaagggtttgtggtttgtgctcctctgctgaccaccatacagacctttgcccttccatgcagcaacctggagcaattgagcagcctgaagcttatgctacaaatatttacaatagacctcctcaacctcagcagcaaaatcaaccacagcagaacaattatgacctctccagcaacagatacaaccctggatggaggaatcaccctaacctcagatggtccatccctcagcaacaacaacaacaacct

SEQ ID NO: 300490 - DNA, 451 bp, Glycine max
  unsure (1)..(451): unsure at all n locations
gaaggtagtcatacctcacacaatatatatatatatatatatatatatatatatatatatatatatatatacatatatatatatatatatatatatatatatgtgtatacgtagagagataccttggatgtgcgtgtgtgtagcacaaaaaatatcacacaatatatatatgtgtgtataggtagcgagacaccgcggatatgcgtgtatatagcanatatacgcacaccacataatacgtgtgtgtatgtcgcaagatacgtgagacacacatgtatatagcacaatacctcacacatatatacgtgtgtttaggtagaaagactcctcgtgacaaaagagagagcgcgcgagangagaatcagaagacaaaatatagagagagatagctatacacatatataacatataataggcgttgtctagctaaaacacaacatgcttgagaaag

SEQ ID NO: 300491 - DNA, 360 bp, Glycine max
agcttgccacccagctcgcccaggcgagcagggttgcttcctccagaagcaacagccttctggaggaatcttctggagggcccaagtgggcctgattactatttgcacccccatttttactaagtacacccccctgccttttttttggtgattcttttttcgtaaagttacgaaacttacgaatttcgtaacgatacttgttttctttccgtaatgttacggaaccttgcggattacataatcatcccctttttgacttacggaatgttacggaacctcactaattgtgcaacgatgcttccttttgatttccggtgcgtcacggaaccttccggattgtgcatcaataccttcttttga

SEQ ID NO: 300492 - DNA, 436 bp, Glycine max
  unsure (1)..(436): unsure at all n locations
ntataagtgcgggtctgggagacaaaggtcaagtggtcgcgatatgtgaagatgatgttccaagaactctggatttggtccgaccatgccctcctgatttccagctgggaaattggcgagtggaggaacgccccggcatttacgcaacgagcataatgtaaacctttacggttntaaaagctctatagttgggcctaggctntagagttttcattntgttaaggctctgtgctctttgtttctgaatttataatacaaggatctttcttcatctgttcctagtctctacccattctcattcatttgcatgttnttcttanacggcagattcgatgacgagtcccccgaaggtactaatacctgggacccgtctatcaacttcgagcaagaaatgaaccaaacggaagatgaacgagatgaggatgtgggactttct

SEQ ID NO: 300493 - DNA, 390 bp, Glycine max
agctttgccgatttagtttttgccggcaaaagaatcgaagtgagtctgagaagaggcaaatttgattatcctgctttgatgaatgagaaagctggggcaaatgaagagaatgaaaaggagggaggaacccatgctgtgactgtcgttcctacatggccaaatttcccaccagctcaacaatatcaatacctagctgatgtgtcattattttttcctatttcttaaccctttttgtcaccattttaattactaattagccttaattgtcaaattaattatgcagttttatcatttgggcctactggactaattttgtgttttaatttaatttcaagagaattataagcaattgggcttgaatccagaattgggcttggacttgaagagagc

SEQ ID NO: 300494 - DNA, 432 bp, Glycine max
  unsure (1)..(432): unsure at all n locations
tctgtccctgaganactggttcccagaagacaacagggagtgaagattgctgaaaaccctagccttgcaacaagtcctagggaagtagacacggagatggacaagaaaatccgcagtattgtgagtagcattctgaaagatgcttctgttcctgaagctgatgaagatgtcccaacatcgtccaacccaaatgtttctgtgcctgatgttgagaaagatgttccaacatcttccgcccaaatgctgagtactctcttcccccagcaaagagagatcaacagaggaagatgatcaagcgacaaaggagacccctgcaccaagggcaccagaacctgctccaggtgacctcattgacctgcaagaagtagaatctgatgaggaacccattgccaacaggttggcacctggcgttgcagaacgattacaaagccg

SEQ ID NO: 300495 - DNA, 396 bp, Glycine max
  unsure (1)..(396): unsure at all n locations
agcttgtccaaaaatatccattcctagcgagacagatttagatatgatgaaattgccaaaattaagggattttttgccttatcttttaccattatggtcaattaagacaatcacgattttctttaattattttatgaccatttttctttaaatgttttaattacaatctatttatttttatttcttttcctttaacgtgctccatcacatcactataaatattggcccttggcatcaattntagatacaccaaaacgaagaacatcttcatcttctcttctttctctgagttctcccttttttgatttccttgctagttcttgttccatgttcatacatgaaggatctgttaaatcttagttgatatgcgcactacgcatataagtcataaagcac

SEQ ID NO: 300496 - DNA, 454 bp, Glycine max
  unsure (1)..(454): unsure at all n locations
ntanaacatacgattgccagcttccttggtgccaacaatttgacacatttctcatgatttaagctatactttntgttgtcatcaataagcaagttgaagataacacctacaatattttaatgtgatgtgaaaatagaagtacggagcatgcttttcttagaaaatttattttttctcgtcctgtgattattagtaaatattggcttctgttcttttgaaattggaagtaatgaacacatcactgttttaatgatttgtttctacaactttcactttgcattgctttgtagctntgtgttcatccaatcgtggtaagtggatatacttctcatgtataactgtgataaggatttgctttctaatttgcaggtactccagtacaggcacatgatgatatggtttctggaacaattgatgcgaaatttgatggtggatatgtagttacagtgattct

SEQ ID NO: 300497 - DNA, 396 bp, Glycine max
agcttgagatgaggaagtgttgaagggtgaaacttcctgcttttattgttgaccacagagtggtacctggagatatgtcgcgggggtcaggagaccttggggacgtcaggtggggtgctattgcccaaaaccaagcttgaccaatcccgacccaacccgggcatagtcggtcagtgagaacctgtgatgtacctaagcaggcgagctcctggcagtcaacagataaaaggaaaacaagaccacaaagcaaggaggcttgtggtggctggccagctgtgaattttgtgtaatatgtggatggtggcctctggtaatcgattacaaggcttaaaattgaggacaggaggctaagatggtctctggtaatcgattaccaaggggtgtaatcgattacca

SEQ ID NO: 300498 - DNA, 457 bp, Glycine max
  unsure (1)..(457): unsure at all n locations
cttcaaccttggccatcatttctgccccacatcgcgaaaggagggcattttcggtgtcgtgaagtgcgtggctacgagtgggacttcgaaaattcaggtttgggtggacttctttctctcttaaatttcgtgggtatggggttttgggagatatgatgggtagtcttgctagttctctgcttcatgatagttatttgtgaagaaacttgttgaaagcttgttgaaattgccatgctggatgagttaacatacccattctgttttagggtttttatgaggatgcttgtgatgttcatgtactgaaattgcttatggaaaactgttagagatgaaaggtagagttaacctagggctagaaagtgagaatgtggtgttatgagtggaaaaagagtgacgctntgagagttgaaaggctaaatctggattctatagtaaatggaggttaatatgagttaat

SEQ ID NO: 300499 - DNA, 393 bp, Glycine max
agctttccctctttgaacaaatacccctcagccaaataaaatccatcttgggccttttgcccataactctcattaatgggagagaaatgttcatctgaagcatacaattccctaatgttatcaaatcctaaaatttgagctccaaaggagtaaaacaatgtgtgcctgctagagagggcatcaactaccacatttgtttttccctttttgtttttgataacatatggaaattactctaggtactctacccattttgcatgcctttttttaacttgctttgcgctctaatgtattttagtgattcatgatcactatgaatgacaaattccttggaaacaagataatgttcccaagtttggagggctattattaaggcaaaaagctctctatcat

SEQ ID NO: 300500 - DNA, 459 bp, Glycine max
  unsure (1)..(459): unsure at all n locations
tagcgagagttggaggtatttagatctgtagaactcgctaaatggcccatctgcgtgctaagccaagccctttatgtgttcaaaaaagaattttgaattttgaatttcaaacatgggttaagcgcacgactgctaagcgaagcactttgagaaaccaaattttctctctggctcacttagagctttggctcgctaagagagaggctcgaaaattgcttaagtgagtgtaacatctttacactcactttgcccagatttcgcagacaatttccctgcaatctctctctcccataatttgtgcaccttgcatttgagctttctatttgcattgtctacttatcttcacaaagcatcaatgatacaagtaagttccttactccctttattcttttattntgttgaaccttacggtagagaaccatacatgttagctgtcaatctttacgtgtttcatgatat

SEQ ID NO: 300501 - DNA, 394 bp, Glycine max
agcttaatagccaaatcaagaaagaaagaaggaatctcttgtgaagttgtattcacttaaaataggttttcaaatccttaaaaaataatgatttacttatggatcaaactatgatagccccaatggaatttttcttccacatcaaatcattttttttctagcagtggccatatcagcccatatgctatgaagcacgtgtacctgcatttgcttcacaagtccataattcaaacccctagtatttttggataattcattgatacacttgtacctacaattactttgtcaccaatcaaatattacatcacatcaaattacaatattgtgaaattgaacagccctagttgcaataaaaaatcaaacaacttaaacataatgttgagttccaacgaac

SEQ ID NO: 300502 - DNA, 457 bp, Glycine max
  unsure (1)..(457): unsure at all n locations
tggaactcgtctggacttggtgctntaaggcttcctatgtacttgatggtctataactttttagcattagagggaattctactcatctcttccaaccattcttcttccatctggggaaaggcattagtcacaacaaaggattggtaaacaccatcctctacatatagctgcctatagaaatctatcaccatatttctttcaatgagaattaacaaaatttggaaactcaaaatgcactcctatgcacttcaaatttgaatggtagtctattatggctcatttggataggttcttcaagtatcaaaaggagagttatatgataagacttcaaccaattaagatgaaataaatatgcttttttgaatcatagtctgcattctaaattgataatgtatttatcaagcctaacaataagcttccttttcgtcaagtaagcgcatcaccttgatacaccaaa

SEQ ID NO: 300503 - DNA, 387 bp, Glycine max
agcttcttatccaaggctcatcttggtggtgaagctccttcttccatggcttattccctaatggatggcgcctcctctcacctcttctcctttgtcttccgctgcatctccatggtggaaaaccaccattagaggacctcattgaagctcaaagatccagcctccatagaagctccacaagcaagcttccatcaagtggtaatcagagcacaagagcttcaagtaggtgctccttaaacctccattaattttttgctttaccttctcttctattggtgtttcttcatttttctccatgtatctcctcacatgtcttgtgctaaatgttgttaacatgattctttagagtttccaccgattaaacttgttatagaagctagatttgat

SEQ ID NO: 300504 - DNA, 426 bp, Glycine max
  unsure (1)..(426): unsure at all n locations
tctgaatgtgggctgagtgaggagagagagagagagttgctttttggtttaaaacgccttttctcttttctattattntattttaagttatgccacatgtctccatttgagtggagcaaaaggcccactttactcttgatgtgactcatgctcagccacatgaagagaataatttgaccttttgaaatgccaaagttctgcctcggattgcgtgttgtttctttggtctagtcccttgcgttctctgtgcccgtcggggccaattatcgaaagtaggcaatatatatatcacaatgctcagaatgaaacctcgagcgtggttcacaggttgagtttgttaaattctaagtcgcacgcaaaacgatgatgtttacactaattaattaagaattaacttataaccttccaattatggatatctcttcc

SEQ ID NO: 300505 - DNA, 393 bp, Glycine max
  unsure (1)..(393): unsure at all n locations
agctttgagaatatggttgcaaccattggtcaatatgggccacattttcccatttcaagctatcatgatatcagagttccactcctgaagaaggaagttgaatacgctgaaaatttgatgaaaggccacagggagcaatgggtcaagtatggttgtactattatgtcctatgcatggattgatcggaaaaaaaatctcaaggttgaaaagaaatctcaaggatcacagattgcttggggactggatgtatgcacgggttgttgccgaaccagtataaaaactcttgcgtgtttgtctccttcttccctactctnttaatttccactgtgcattttaatttctgcttttacttttgcgtaagtttctcttctactctntattcacttaacaaca

SEQ ID NO: 300506 - DNA, 454 bp, Glycine max
  unsure (1)..(454): unsure at all n locations
tatgctgcacacatttataatagacctcctcagcagcaaaaccaacagcaatagaataatcatgacctttcaagcaatagatacaatccaggttggaggaatcatccaaatctaggatggacaagtcctccacaacaacaacagtctatccctccttttcagaatgctgctggtccaagcaagccatatgttcctcctccaatgcagcaatagcagcaacaacaacaaagcaacaagcaactatgcctctcctcaaccttacttaaaagagttagtgatgcagatgaccatccagaatatgcaatttcagcaagagacaagagcctccattcaaagtctgacaaatcagatagggcagatggctacttacatgaatcaagctcaatcccaaaattctgacagattgccttcacaaactgtgcagaatgcanaacatgtgagtgccatcaccttg

SEQ ID NO: 300507 - DNA, 388 bp, Glycine max
  unsure (1)..(388): unsure at all n locations
agctttcaaaacctaggtatttctgcaaaagctgctcctcttgctgcctccagagctcttttcctgaaatatgaactgtggtgtgctgtaaaattcttttccctgcgcccttgttatcctaattctgcataaaacaggctttaaataggctctgaattcctgacgttgcgcttagcgccaccctcgcgcttagcacacgaccttgatattgatgccctgccagattcttctgtcacgctaagcgcgttgaagctgcgcttagtggcggatgcgcgcttagcccactgatgagctaagctcaactattacttttagcacttcatgacttagcctcattntcacttgaaattgctcatatttcatcattaaatccaatggacatattcta

SEQ ID NO: 300508 - DNA, 441 bp, Glycine max
  unsure (1)..(441): unsure at all n locations
ntctcttcatctctagagctagagagttggatgttacattgaatagatttggttcttgtccctctcaagagatttttgattgatttctagttggtaagcacccatcctcttctcctatggtcccttgagtttattttcttctcccaccaagtagacatgaaatggggtttcacttcaaattttgattggtaggtgaaaatttaattgaaatgagcctgagtcacaccactcattaaaatgcagggaattgctatttgcactcctcctttataataatacaatccctatttatttatatttttccaaaatatccctaacaatacattcccaatgttcactccttgcaattgtctttcgtcaaatccctactgtgagtgcgagcacagagcaacaatacaccatcaacaaggagganaacttgtttcaagtaacccaatcatt

SEQ ID NO: 300509 - DNA, 386 bp, Glycine max
  unsure (1)..(386): unsure at all n locations
agcttatgctaattaatgagaaaaactcactaacacaaccccaaaactcacttaaacatgctcaagcccttattattattattattattaacataattttttttaataataacaataaataatatttatttattcatttaattataaagaaaacattntcacaatgcanaataatcttatataataaataaatatataaaacaaatatctgggtgttatagtccgtgtgtgtttgttatgatgattgtgtatgatgggaatttgtgataggtgatgccaacaatggtttacgtggtgtatgatgtttatgactcctgatgatgaatggtgatggaactatgttgctgttgacggtttgaggaatatgttctaaggttgctatatat

SEQ ID NO: 300510 - DNA, 437 bp, Glycine max
tgatcaaaacaattatctaatcatttcaatccactcaaatcatacaattgctcattcaaatcattctcaaacactcatttcatgcaaaacaatccactgcatatcattttcaatcaattcactattcaaacacgcttttggtacaagtaaacaactcaaagtgctgaaatttaaataactaaaatttaaaataactaaaatataaaaactgaaattaaaatgactgaaccaaatcataaaaaactgaaaataaactaaaattttcaagatgcacaaatttaaatgtcctgctcctgtggttgctcctatgcatgctcattaaggtccaacacctgagcagctggtgaatcctgagagataggctgctctaactcagatgctagtgcagatggtacaacatcatcaggtatgggtgctagggatggctctgggatctg

SEQ ID NO: 300511 - DNA, 394 bp, Glycine max
agcttagaaagcaaccaacatcacaggtaaacaaaagcaagacacaactttaccaagtaccaagcatgagtgaagaagtcaagaagatggagatgaaacccaaacaaaccatcttgatcttcttcaatttttcaataagatccatcaaattccaagtcacaataatgaactaagcaaaatgacaccaaatagaacaccaaaacatgaaaaaacaccctagagaaaaaaaaatatagtttttttttttaaaacatacaaacacagaaggaaaactcaccaaatagagggtatttaagcacttagagcaccctccaagacctggtaagccattgacattagtgctgctactcaagcaattcttctccaaccttctcacaattgcatccccaacaag

SEQ ID NO: 300512 - DNA, 404 bp, Glycine max
gcttatgctgaatcggtgcggtaccgcatcctatgcatttgaagatctgccttccatttctgcttggtgaggaagcgagaatcatacgatctgcttctcagctttctaaaactatttacagatatgctttgccattaatatacaatgcaccttgggatccggctcctgccttatgccaactgcgcattatatgtcttttgaagatgctcatactacgcttacttggatatccctcgtaagcactatccgatgctctatccatttttaaacacttcatagtacatgttgtgctacaatctaaccggaagagtaacgctattcatttagatgatggagagaaatgatgaggcttctttcatatcatctgaactatggatcgttatagactaactcgcctcacacac

SEQ ID NO: 300513 - DNA, 336 bp, Glycine max
agcttgtaggattatggggtacccatcacatgtggtactaggtggcggtgggcgatggtgcacaacaagttttccacatccacaatgcgcgcataaacccaccatcccctgttgcccacctccatctgagctcacgtactcccacgtagcccatatcctcgtttctctcaacaccgggtccccatcaatcctgccaagcttccacaacatccaagcaaaacaacattcaacagcacaagctatcacagccaagcaaaacagggcaaaggcagaaaactctgctcaacacaccaaccaaaatcacagcttttctcacttaaagaccccagtaacaat

SEQ ID NO: 300514 - DNA, 360 bp, Glycine max
  unsure (1)..(360): unsure at all n locations
tgtcccnaggggctcacctaagcgagcttataaatcatgaacatattccttataggggtatcttaggctattcctaaatggcgctcgaataagccaatcttcattataatggctaccttaagcttgttcctaaatgatgggctagcttaagctagcctgctaacttccaagttcttcattagaatagctagcttanaagtctgcccctaatgatctagcttaactagcttggtaattccaaattctttacacttttctttcaatgatagctgtaaatatctcttcaaagagatccttaatgtaattcctacanagagactaaacaacaaaaaccacacaaaagcaatanaactaagttct

SEQ ID NO: 300515 - DNA, 398 bp, Glycine max
  unsure (1)..(398): unsure at all n locations
agcttgcaacaatggtattgacagagtcacaaaacatacctgggtacagtggcgaggcgtaacggtcatgcactgtcacaagggctgtagatgttgagatagagtcgcgaacacgaaccttagacggagaagaagagagcatgaggaaaatagggctcactttctaattttttaaatgtagattccacattgattttcaatacaaaaccgatgttaaccaagcaatgtaaatgttaacatcggtttgttggaaaaaaacctatgttaactcatcaaatgttaacatcagttttgaagaaactgatgttaaaaaacttatattaacataggttttcattgatttttagaaaaccgattntaacgaacttacattgacatcggttnttaaaaaaccaatg

SEQ ID NO: 300516 - DNA, 452 bp, Glycine max
taacaaacttagacatcaagtgatcatgtattccgaaatatatggggagaaaacggatgcaccttttatctatatacaatatacaattgtttgttgcttgcttgaatcttgatttcaggtattgcattgtcatcatcaaaaagggggagattgtagatgcaattggctctgatgttttgatgatgatggggagattgtagatgcaataggctttgatgttttgatgatgatcatcttatgtgttgcattaatgcaaaggggcttttcaagattaaaattcaagacaatacttcaagattacaaggcacaacatcaagatgatcactagaatattaggaagggaattcctaattgaattagcaaaggtttggccaagtgatttacaataaaaagtgtttttcacaggttctactctctggtaatcgattaccagaggatgtaatcgattacca

SEQ ID NO: 300517 - DNA, 392 bp, Glycine max
agcttctggtgggacatcttgacttgctttccaatctgacattcaccacagattctgccttcttctattttcagattggggatgcctctaacagcacctttgtcaatgattttcttcatgcctcttaagtgcagatgtccaaatctttgatgccatattctgacttcatcttctttggaggatagacatgtggaggagtagctggtttcttggggtgtccataggtaacaattgtcctttgatctgctgcccttcattagaacttcactcttctcatttgtcaccaagcattctgactttgtgaagtttacattgaatccttcatcacacagctgactgatgctaatcaagtttgcagtcagtcccttcaccagcagtactttgttcagact

SEQ ID NO: 300518 - DNA, 452 bp, Glycine max
  unsure (1)..(452): unsure at all n locations
tctgttctcaattgcgagcgtctcgatattgtacggcgttctatccgacatccaagttaaaagttattgtcgctggagttttgtaagagcttcccttttcaattacgagcgtctcgatatattacgggacacaatcggacacccgagttaaaagttattgacggttgaatgcgctcagagcttctattttcaattacgagcgtctcgatatattacgggactcaatcggacatctagccaaaagttttgtcgttcgatttttctgagagcttctgttntcaatgacgagcgtctcgatatactaccggactcaatcggacatccgagttataagttattgccgtgagaatctgctcagagcttctgttttcaatttcgagcgtctcgatatactacgggactcaatcngacatgcgagtgaaaagttattgtcgtttggattggctcagagc

SEQ ID NO: 300519 - DNA, 394 bp, Glycine max
agctttttggagtagaaacatgggaccaactcattttatttcaaaaagaaagtcgtatctagtcaaggtctgagagaccatacaagtttcctaacaatttctaattatgttggccattaagtctatcatatgctgacaatagccgagaagcccatgaatctcttcgggggcggagtaggtgtacgccatcgccttggccttggctaacaatcggggaagttcttgactcccgttcaaggtaagagcaaaccgatccatccacatggttgcctcttggtgtaaagagtcgatcacccttcctctagcctcttattccgcgtatacttgggcatactcgtccgcgaccctatgctcgtgggccgtggctatgcctaactcttctcgatacttggcg

SEQ ID NO: 300520 - DNA, 432 bp, Glycine max
  unsure (1)..(432): unsure at all n locations
tacatagtcctcatcttacactaattctaacccaacacaaatacccatattatatacagctacagttaatatcttctaccctaaagttaagacaagaaacagagaaaaaggatcaaggaatttacttggacggcgtatgattgatgcttcaaagtccaaaatgcacaaagagagtacaaatgcaaaatgtgcaaatttttggagagagagaatgcacaggcggcgtttctgtaatctgcaaacgcgatgtaactgatgttacactctcttaagcagttttgatacttttgcttaacggaccgttgcgctaagcaagcaagagagatgtctggtttctaaaccatgctcgcttagcgaacatgcgcttagccgacgtttcagattcgaaaacaatctttnttaacagatactcggcttagcgtgcaagtaagt

SEQ ID NO: 300521 - DNA, 395 bp, Glycine max
agcttaatcaattgaaaattgacggtgtgagattttccctagactctactaggggcaattttcattggcacccttaatcatgttcaatttgttggtaagtttaggtcttttaatccaaaaaaggaaacttggttaccatgtgagagtaatttggataaatgaaactagttttggttgttatatgcatgaatatttcgatgcttgtttgcaacaatgtattatacaaaagtacctaccacatagagagtggctatgcaatttggaatgcatcaagaagtttcagattgtgtgattgcattctctggcaccaaagctattgcattgaaaaattactgcatacccaaaattactttaaaaaattgcaaagaatattacttggcaaaaaagcagtctaa

SEQ ID NO: 300522 - DNA, 429 bp, Glycine max
  unsure (1)..(429): unsure at all n locations
ttcaattctttcgaatctttctgttgcatatttgaggtctaagtctaactttgcttcttagttgtttaacattntgacaaatgaaagttagaacaataatgatttgattcagctcatgctacattgagtttttaacttgtatttcacacggaatattaatagtcaataatcttgaagtcagaaaaataatgatttgattcaactcatgctatatgtactttgatatattattctttcaaaaattctgaaagaggaaatatccactcaaaagcagattccagacnaaaaaaatcaatcatgtaaacacatagattggaattctaattgttaaaggcggaagcaacaaaactaacagtgagttacagccttgggaagacaacccncagtgcatcttcctgcaactgggggatcatgcaaaacatcaaaaca

SEQ ID NO: 300523 - DNA, 388 bp, Glycine max
agcttttgtgtgaaaggatgtgactcttcacatttgaatttgaatttcaacattcaaaggcactggtaatcgattaccaaaacattgtaatcgattatagctttatgaaaataattggaatgttgtaaattcaaattgaaaactttttcaaaacaattttgctactggtaatcgattacaacaatctggtaatcgattacccgagagtaaaaactctttggtaaagggttttgtcaaaaactcatgtgctattcaaagttttaaaaaactttttaatacttatcttgattgagtcttctcttcattcttgaatcttgagtcttgaatcttgatcttgattcttgagatcttgaaccttgaatcttgattcttgagtcttgaattcttc

SEQ ID NO: 300524 - DNA, 453 bp, Glycine max
ttggaggtccaaaatcaacagaaagttctggaaggataaattgcaaaaattgaagatagaagctagaacaatcaagagcaagatatttttgaaggataaatcagctaaagaagaagataattatttgtttgtagtttcttgtgatgatctccttaattaaaccaagctacaattctataaataagaggctaggtataaataagaggctaggtagaagtcccgaccagttctacaattatatttagacttccacctactagacacctccattgttccattagacactctagatttcattgtatgatttttatgagtgcaattcctttcatctaggagacgaaaggatgaaccttgtttcactttaattctatcaattcaatacttcatcttgagttctttatttatttccgtacataatgctcttatttgattgccatcttatagatgtattca

SEQ ID NO: 300525 - DNA, 388 bp, Glycine max
agctttgatgcaacattgggagaggttaatgaaacaacgagatgatgcgctccatgagaggttggatcaaatggagaatagagatcacaatgaagaagaaaggatgagaagatggaatgatggtgttcctagacaaaaccgaattgatggtattaaactcaacattcctccatttaaaggaaagaatgatccggaggcctacttggagtgggagatgaaaatagagcatgttttctcatgcaacatctatgatgaggaccagaaggtgaagcttgccgccacggagttttccgactatgctcttgtgtggtggaacaagctacagaatgagagagcaagaaatgaagagccaatggttgatacatggacggagatgaaaaagatcatg

SEQ ID NO: 300526 - DNA, 408 bp, Glycine max
  unsure (1)..(408): unsure at all n locations
tgcgcgcaacattaaatgagctggaataaaatgccttgcggaaatggatagaggtaagaaaagggctgatgctaggtgcacccagcattattgctagtgcacccagcatattatgttaatggacaaaaatacccccttggtaattttttaaaacaaatgtgcagcgcccctgatttctcttcttcttctctcacacgactgtgcacccagcgcctccctatttccttttctacgcgactcttttcttgacctcttcttaggccactctgcttcttcttgtgtcattgtcttcttcttcatcctcgtttgtctctgcgttgtgctttggagctttgcattgacgacattgaagacgtgaattgngctgtgctccaccgtcgacgtcgaggtaagcctattcttcccatg

SEQ ID NO: 300527 - DNA, 390 bp, Glycine max
agcttgcaaaatggaagcaaagaagtctatctatggggggcagaatcactctcattaattcagttttatcagctttacctatctttttactatctttttttaagatccctaaaaaagtggtgcaaaagattgtatcaattcagagaaatttcctttggggaggtcatcatgaggccaacaagattccttgggtgaagtgggacacaatttgccttcctaaaaataaagggggcctagggattaaagatctctaaatttaatgaggctttacttggcaaatgggggtgggagctgactaataatcagaaccaaccttgggcaagaatcttactctccagatatggtggcgggaaggagttgatctttggtggaaagagcaaatcttcctct

SEQ ID NO: 300528 - DNA, 449 bp, Glycine max
  unsure (1)..(449): unsure at all n locations
ntcccacaagactcttattctggacccattgcgattatgttgttgaagcacacagttgcctgtgtccaacacagtggccagtgtgttattgataggttgaggtggtgaataaaggattattggtgatttcttcacttttttcttaccatcttgcgattctattttgagtacccctttgtgatccaatgatagaacagcagaatttgagtcaacaggttggtctctatctcaccccacactcccaatcatctttcttttgggcacatatagtcaagtaaactgcttcctgattatcatgagttattgggtcgaaactcatgcaatatttacccttttttgaacatagctctgcccctggtaccgcggcattcagagtatcacctggcttcaaactatcattggcttcaacgtggatacaagtagtactccaccacaaccacatatagatg

SEQ ID NO: 300529 - DNA, 381 bp, Glycine max
agctttataagcgcaggtctaagacacgaaggccaagtcaccgcgatatgcgaggatgactccccgaggaggtcggatttggtacggctatgtcctcctagtttccaactaggaaattggtgagtggaggagcacccagacgtttacgcggtaagcataatgtaaccctttgtagcattaaaactctacgattgggcctaggctttagagtttcctttttgttaaggcattatgtcttttgttcttgagtttataatataaagatctttcttcatctgttcctgcgcctctacccattctcattcatttgcatgtttatttctttacgcttaaaacgccagatctgacgacgagtccctcgaaggtactaatacccgggac

SEQ ID NO: 300530 - DNA, 449 bp, Glycine max
  unsure (1)..(449): unsure at all n locations
tgtccgcanaanaatcacttaaaaccgttttaaggtccaacgccttatacggtcctctttgcttttatcggttaacatggaccgttcaaaagcataaaatcaacacatcactttactgccttttgtgagaactatgtaggtctgatttcctcttcaatggaggatacgtaggagcaaaagccccgcttttgtcgacctcgtgagatggttagaggtccaacgccttagctttctcaccaataaaatggatcattttaaggtacaacaccttanatgaccaccttccaagtaaaaagaatcacttgattcgccccttttgaaagaactacgtacgtatgatttcctcttcgatggaggatacgtacgagcacaagccccgcttttgtcgacctcaaaaataaaaaaggacaaaaagtttacgatacatgatttcacacaactctaaatct

SEQ ID NO: 300531 - DNA, 350 bp, Glycine max
agcttttagatgaatttttctatgacaacttttgataaatatgtataatactaacctcatttcactcatcaatatatgtccaatacacacaagtatgcattttaattagtagattaagttaatgtcattggcataactatccaatgtgaatgactttatgtctaattgattgtagattaagtttgattcattagtgctaggtatttcattgacaaataaatagtcctaaggagtagtatgtatgtatgtttttcttttcttaaaattaaaaaataggaggatgctgacttacttctcatagtattaatcaaataccggggctgttcatcacaacccgttccattgcaaag

SEQ ID NO: 300532 - DNA, 449 bp, Glycine max
tcaggctattcaattgcttcagattgttgcacagaagggcataggtctgtgtggtggtcgacagaggagcataaaccacagagtctggcgacaggtgcagatttttgattcatggccagtttggttaccaggttaaccaaggcatctagtttaccttcaagcttcttagtctcacctgatgaagatgaattcatggctacttcatgcactcctctaatgacaatagcatatttctggcactaattgctgggagttggaagccatcttctcaattaaatttctggcttcagtacgggtcatgtctccaagggctccaccactggcagcatctatcatacttctcttcatgttgctgagtccttcataaaaatattggaggagaagctgctctgaaatctggtggtgagagcaactagcacataatttttacatctctcccaatatcatat

SEQ ID NO: 300533 - DNA, 383 bp, Glycine max
  unsure (1)..(383): unsure at all n locations
agcttcatggtgaatcaaaggtgttttgatgataacaaaagatgatgacaaaggtgatgacaaaaagctcaaagatcaatcaaagaacaactcaagtgaatcaaagatcaatcaaagaacaactcaagtgaatcaacaacaattcaagagttcaagataagaatcaagaataattcaagactcaagaagaaagtttagagtcaagaatcaagattcaaggttcaagatctcaagaatcaagatcaagattcaagactcaagattcaagaatcaagagaaggcttaatcaagataagtatgagaagtttttctcacaaattgagtagcacatgattgttctcacaacatgtttaccanagagttgttactctctggtaatcgat

SEQ ID NO: 300534 - DNA, 450 bp, Glycine max
  unsure (1)..(450): unsure at all n locations
tggagaggatgcttcaatggaggacaagacagagggagagaaagacagaggggggagcacgaaattgaaggaagaaaaaaaagggagagaggttgaactttgagttgtgtctcataagactctcattcatcaaagttacaacaagtgttacacatgcttctatttatagactaggtagcttccttgagaagctttcttaagacaacttccttgagaagcttctttccaaaacttcctgagaagctagagcttagctacacatacccctctcataactaagctcacctccttgagaagcttccttgagaagatccctacagaagctagagcttagctacacacacctctctaatagctaagctcacctccttgagatgagaagctagagcttagctacacacccgctataatagctaagctcacccncatgacaaaatacatgacaataca

SEQ ID NO: 300535 - DNA, 368 bp, Glycine max
atcgatattgattgatttagtgatattgtattttgatccttgagtatgtgaatgatgtgaaaatgtaatagcgtgacgtgttgtgttgtgatcgatattgattgatttagtgatattgtattcttattccttttattattagtacatatatgtgtggggtagggagtgtcacacttgttctatcagcaacactttgtgatattgtggtcttaacaccttcaagtcacatgtctctagctaattaagttattggctttagtcttgtcaaatctattaaatttaaggctttgtgatctttaataaatatttgattctatatctgttgttaaataacattttggtttacgatgagtctctaataaaataat

SEQ ID NO: 300536 - DNA, 445 bp, Glycine max
  unsure (1)..(445): unsure at all n locations
tgcatagatacaatttgctaatgcatctcttgcatcaattacctgaatataggataaaaaattggatataataatacaatacaattaggagaaatagaaaactagatcaactaaattgttcaagtaatagacaaacccgctccaaggtcaatgtcttggtaatggtatccttgctagcttggattctatgggtagataatacttccattagctcatgggaactcaacccattagcaagcaacatttgctacagtttccaatagaaaagaaaaaccaaagtcattttttagtaactgaaatttcaaatataccctttatgttattcatagacaatatgaaacaaggagggaggattgcccactcttgtatagattactntgaccatattcctagttgatgtggaacttcttaacaattaccttcatcattcaccacctcaatatga

SEQ ID NO: 300537 - DNA, 356 bp, Glycine max
agcttgttattgaactgacgaaaaatcaagaacaagcctgtacgcacatcgatcgcgtgtatgatatccaatccacaaggtttgaagttaaggacagctttacccctatgacgcaacgcggcggacaacagtgggcactaaacgttgatggacgtcattgtcaatgcggaacgtattctgcgcttcactctccatgtacacacattattgcagcttgtggatacatgagcatgacctactaccaatatatacatgttgtctatacaaacgatcacatcttaaaagcttactccagacaatggtggcctcttgggaatgaaacggctattcctacttctgacgacacatggacactt

SEQ ID NO: 300538 - DNA, 525 bp, Glycine max
  unsure (1)..(525): unsure at all n locations
tagggannaaacgaggncggccnatagaaactgtggcantacgagacacatagaatactcaagctctgagaccatggctgcagccattggtcaatatgggccacatttgccgattccaacctatcatgacaccacagtgcgcactcttgcagaacgaagttgaatctactgcaaattagatgaaaggtcaactggagcaacgggtcaagtctggctgtagtattatgctcgatgcatggactgatccgatacaaagacgcctcatgcattttttgatcaattatccacgcgcgcccatgtctgccaccctctctcactcgttctgagtttaagaagatagatgaaaagctttttgagtatcttacatgtctatgacgatgcagacttctaactataatcgtctactaagtcgtagtcgtgtatgcgcagcactatgtattccctggctattgtccgaggataactcacagatcctacactactcctttcgacgtcattaataaaccgaacaataagatatcgccg

SEQ ID NO: 300539 - DNA, 129 bp, Glycine max
gaactcgactcgggatcctgtatactctaatgcagcttgcagctttactttagcgcttttacgggtagatgatgtgcatatgatctatctacggcttgcacttttaattcgcacatgcatggacttgta

SEQ ID NO: 300540 - DNA, 222 bp, Glycine max
tcgcacccgtataaaaaacgagaacacttctttattgtctcttagcgagggtgagcactttatcaatcctggattgaccgagcttacatactcaaagcatgccactgttgcatgaatagctatgccccatcaatgtatgacaggacatactctcatgtcttacacacagcgaaggtccccccccctccgcgcccgtttttgaactctagatataatttacct

SEQ ID NO: 300541 - DNA, 359 bp, Glycine max
tgccgtctcatagtgcaacgccttaaaccggcctctgtgcttctactgggtcacgcggactttcagaggcctacagaccacatgtaactttgtaactactttcaaatacacccacatcattcctggcccaaggccttaaggtccctctctcctcaacgaattaactagtccttcaaatggactacacccgtaaaccacttttgactggcctccatagtccttgcaagctagggatcaccacaccataccctctgcccaataacatattactgtctaaggacgacctcccttcacaatagacgaaacctttgaacaatggaacgccagtagctccaccatagtttgaagatctggaggct

SEQ ID NO: 300542 - DNA, 205 bp, Glycine max
gtgaacacagtatcttgaggacataaaatgaactgttaagctatccatgtgcacatgcgacttgcactgagtaccaaatcattgctgtggcttggtcattcatcccacacatgcacttaatatgatacaatttcaacatacaagactaccttgattattttgaaccttcatacaaagggtgttctgcatatctcggtaatgcata

SEQ ID NO: 300543 - DNA, 378 bp, Glycine max
cttatcattaatgcatgaaatgagggcacacattctacaaatgttatgatatgacatccgatgccctgacaggtaaacgcgattgggtctccttacagttaactgcccaaataaaccccattggacccaacctcaattgggaaccacctctctttaatcgactttgacctgtaacctaacaccaagagactcactatggtacctggaaagaggcttgatctacgcacatacttggagacaagtccatacttacctactcttcgtctaatgaacgtggatacgtcacttttggagactacaacactggctagaaccatgggacaaggaaatatcggaaatcaaaaaagacacagatatataacgttctatatgacgacg

SEQ ID NO: 300544 - DNA, 512 bp, Glycine max
  unsure (1)..(512): unsure at all n locations
aggccccacgggcggccttgaaatgtggattacggacccatcactacccactgctgcttgcagcagactcctgacgagccacggnacccgattcttgaattcgccctatagcgagccgtattacaattcactggccgtcgctttacaacgtcctgactgggataaccctggcgttacccaacttaatcgccttgaagcacatccgcttttcgccagctggcgtactggacaagacgcctccaacagatcgtcattcccaacactcgcgccggccgaatgccgattccccccgcaagcacccctcctccttaaaattattgcagtttttgaatcggatatgggcgactgtcagtacaatctgctctgatgccgcactattaacgcaggcccgacaaccgccaatacccgctgacgcgaactcctagntgccgcatccaacatacacttcgacatctactcattcacctatctcttctccgctcaacacgcaccttcattacaatctctctccg

SEQ ID NO: 300545 - DNA, 275 bp, Glycine max
taccctgatgaggattgtccatatgttcttaaaactggactgatccttttgattccaaagtttcatggccttgtaagtgaagacccacacaagcatctgaaagaattccatattgtctgctccaccatgaaaccaccagatgtccaggaggatcacatatttctgaaggcctttcctcattctttatagggaagtggaaaggattggctatattaccttgctccaaagtccatcacgagctgggatgacctcaagagagtattcttaaaaaaaaa

SEQ ID NO: 300546 - DNA, 409 bp, Glycine max
taacacatgtttccatgttcaaatcaaatcagtgttaagacatagtttcgaaacactgggttgcctcccaggaacacttctttaatgtcttttaagttggatgtccttgttatgacttacgccttcactgtttcatcatccataattcttttcttctttgtaagaaaatacttcatgaatttagtgtatgttggtatatgctctaatgccttacaaaaaggaatgttacctcctgtcgttcaaaatgtttaagaaacacttgtatttcctttccttatatttctttgacggagcatacacataaggaagatgctcaagtggcggatggcttactacaactctacctttgctagtggcttctttctttgatttcttcttgacgtaccactctctcttcaactttttcagt

SEQ ID NO: 300547 - DNA, 384 bp, Glycine max
  unsure (1)..(384): unsure at all n locations
agctttgtccataaaaatcacctaaaagccattttaaggtccaacgccttaaacggtcctctttgcttttattggttaacgtggactttcgaaggcctagagtcaacatgtaactttgtcactactttcaaaaaccaagagatcattaatggtccaatgccttaatgtttctctcccttcaaaagaatcaaaaggtcgttcaaatggtctaacgccttaaacgagttttgtttggtcaaaatatatcttgcaaaaaagggataaaaacaacttaacccatgcccagttctcgaagaactacgtangtttgatttcgttatcacaattgaggaatacgtangagcaagggaaacacccttgtcgaccacaataaggataaaaata

SEQ ID NO: 300548 - DNA, 444 bp, Glycine max
  unsure (1)..(444): unsure at all n locations
tgataatcattntctttgcctcataaaatgaacttggaagctttccatgttcaaatgcatcttgcaagagttacaaaatcattgccatggctttgtcattcatcccacacatgcatttaatatgatacaatttcaacaaaaaagacaaccttgaatattttgaaccttcatacaagggttgttctgcatcttttggtaattcataaaactcttcggcttcattcctttctgagtgttttttgaaccatatcttcatccctatcaacctctacattgaagcaatgggcacttcattcgtatgctgcctatcaactctaaaagcatcattaatcatattttggataggatntttaataatgttgtcttgaactacatttgtatgtgagacatttcgagtttcttcacttctagactccccatggtacaaccaaaatgtgtacccta

SEQ ID NO: 300549 - DNA, 380 bp, Glycine max
agcttaagcaattaaaatagtttaatcatgattatttccttttattattttaattaattatgcaatggaaaggataacaagtcggtggtaacacactatagggctaaacttaatggctctgctgttacgttcaaccacagatgagaaaaaaaaactgagtccaggatgatggaaagcatcaaagatatatatatatatatatatatatatatatatatatatatatatatcaccagtatcataacatgaggcagatagaaactctgtctgataaatttggcttaacaaaaaaagtaataaaataaataaaaactgagagagaatacggcagatagagacatctctttttggacaaagaacctaccatctagtctaagtac

SEQ ID NO: 300550 - DNA, 370 bp, Glycine max
  unsure (1)..(370): unsure at all n locations
tggagtcatgagtggtaagttgaggtctaagtggattggtccttttgttgttactaatgtttttccttatggtacagttgagatcaaaagtgactccacaaacaagagcttcaaggtcaatggacaccgacttaagtcattcctcacaaacccttctttattggacgtagtggtggaagagacttccttactccaccctactcttcctccaccatgacttaaggagttcgcttttcctataccttctttacttttattacatntgtccgattctatatgatggtttaattgcttttaatcttttaattgtgttacattgaggacaatgtgttcgttaagtatggagggaggggggagtgttctgggctgt

SEQ ID NO: 300551 - DNA, 382 bp, Glycine max
agcttggttacctccttcttcactacatcaagaatcactgggttgagtcttctctatggctgtcttattggtttagcctcatcctctaaatttatccgatgcatacatatggatcggctaataccaggaatgtccgctagggtccagcctatagccttcttatgcttcttgagaactaataacaacttctcctcttgctcatcagcaagggaggcagatataaatactgttaaactttttctatcatccaagtaagcatattttaaatttgatggcagaggtttcaattctggtgtgggtggctagatagtggtagaaagagatggtttctcagcctgtacctcataaagaaagtcagaggtatatgtacttcctaaaacat

SEQ ID NO: 300552 - DNA, 439 bp, Glycine max
  unsure (1)..(439): unsure at all n locations
ntntgcaaggttganaagaaatctcaaggaccgcaggtcgcttgtggactacatgtacgcacgggttattgccgaaccaatataaattcttgtgttcgtcttcttcttccctacactctctaattttcgttgtgcacttttaattatcgctcttacttttggttaagtttcaattattgttctttactttcttaactctgtagtaaaagcctaattaaatctacgcacattaagaagatcacttttaattagtcaaggtacattaataattaattcaaccccccttcttagttattccgagaccacttgatccaacaattatgatatatagtgtgcgcttaaactccaaagagcatactactgacctcagaatggccacttcttgagcaaactcatcctctaaggcatcattcaattgctctgatctcagaaccttaac

SEQ ID NO: 300553 - DNA, 381 bp, Glycine max
agcttcttataaatagtagattaatctatttcatttattaagattcaatttgaaaaacatttaatttttaatttaaatgccaacaaagtaaaacttgatatgagaattaattgaaaaatattatattaatcttgaaaagtttataagatttagtaaatattctatgataatcttgaattatttttaaaattgaaagtattgagagaagttttaagagaagaaattaatacttcaatgaaaatactaaatcatataaaatattttcttttttaaatatatgcattccttataaatatcgctgaaagaaaattaataactttctttataaattatttttagaggatgtaacatttatctaagatcaaaattgttatgaaatag

SEQ ID NO: 300554 - DNA, 424 bp, Glycine max
  unsure (1)..(424): unsure at all n locations
tattgaagaaggctattatgtgcaggtgaactgtnttttttgtttatgtatgtatatttgcattgcttgtaccaatttgcttatatattggcgaagtacgaagatggtgagtggaaaaaaataatataactaacaaataaattaacgagcattaagctgaacgcgtgataggggattaatgcaccaaatggtcgaagcacgatactttctacagactaaacatcaatgcttctaactgtctttctattggaaagtcaagtgacgaccttatatgaatttgcaagagcacaatattgctaaccatgcgcggagttattatacgctccaactccatgtgttactcatccttacaaacgtgagaagaaaccattttactgctcagctctcacttccccttcatcttttcaccgccatcaccaccacc

SEQ ID NO: 300555 - DNA, 248 bp, Glycine max
agcttctcaaagaggagagctttgatatgagaggggagagggatgctaagctcgacccttccacggaagttatgccaacgaatctgctcaaggaagtaatctggcgaaaacctctcaatgaagctaccgagggtatgctcagaagcttgcgaaagacttgttgtaactttgatgaatgacagtcttgagagacataccttgtagtgccaattctctgcctctatgattccttcagtctcgagctcccc

SEQ ID NO: 300556 - DNA, 377 bp, Glycine max
  unsure (1)..(377): unsure at all n locations
cgtctctacgatccctatcaatgaatcttcagatctattatgcataatgtctctatggcacattaaaactacaacatctatacccatattaattaaaggtttgatgactacttgtacacaactgatgtgtaagtatttgtacttaccgctgagttcatacattaaattttttgacagtgaatgaaattcttttcttatatcttattccagagaaatatgattatgtaatcanaacctcccttgattcttccataagagtattctaatactttcccatgtaatgtaatagatatcgtttataagtgtatcctcatactttcacacacacatatatatatatatatatatatatatatctatatatatatatgtgtgcg

SEQ ID NO: 300557 - DNA, 399 bp, Glycine max
  unsure (1)..(399): unsure at all n locations
agcttataagaacaaaattgccttaatcatttccaaatatgcatgtgaattaggacgcatcaacaagaatcaagccaaggctattgtgcaagcaatcaatggggcaaaacacaccaaatgattataatgatggatggctcaaattctcacaaaggtaaaatcatcactttcaaattgagctttcaaaactatcatgacatgtagagaagaatcaaggatttcaagtcacaaaatgtcaagaacttttattttcaaaacatttacccatttcttgaacatatcctataattcaaagaanaacatgcaaagtcgtacgtgcacacaaaattgacccaaaatattaaactgaaaatccgacgaaactaacaacattaacaaattaacacaactaacaaatta

SEQ ID NO: 300558 - DNA, 446 bp, Glycine max
  unsure (1)..(446): unsure at all n locations
nntgaccccttgattattcccttcttttactctaaactctgctcacagatatgttgattaatatttccataaattttcatatggtatcattaccttgctcaaattcgtatgagtattgacaaaatgagggtttgcaaaaaaaaaaaaactaatgcttgctaaataaataaccagagttgttatgagactttttcttttgtcactttgaaatcaaagtgatttcaatttcaaggtcaaaaaaacaaatttgaaattttgtactaagtgtagaataagaagctntgttctcaaaataacaatgtacagtcaacttaaataaatttctctgatgttnttgcactcgtgggagagtcctaaagcttgatatgaattcaagaaattctgatgagcttctattgtgtgacttgacatgaatgtgttctctagacatcattatatcatctcat

SEQ ID NO: 300559 - DNA, 392 bp, Glycine max
  unsure (1)..(392): unsure at all n locations
agctttaggctattcaattgcttcagattgttgcacagaagggcaaaggtctgtgtggtggtcgacagaggagcataaaccacaaagtctggcgacaggtgcaaatttttgattcacggccagttgggttaccaggttaaccaaggcatctagtttaccttcaagcttcttagtctcggctaatggagatgaattcgtggctacttcatgcactcctctaatgacaataacatcacttctagtactaaattgttgggagttggaagccatcttctgatggaagcttgcttgtggggcttctatggaggctggatctttgagcttcaatggggtcctttaatggtgattntccaccatggagatgcagtggaagacaaaggagaagaggtgag

SEQ ID NO: 300560 - DNA, 456 bp, Glycine max
tctctgaagggcatggttatttccagtttccttaaaatacccaaaaatctcgccaaatgatggtccttctccttcttggaaggtaccacaggatatggtacttccttaccttcgttttcatccttttcaatttttttattttttttctttttcttggtcattaaattctttttgcttgaccattatttttttctctttatcttgattgctttcacctctcacctcatttttctcccatcagtaccttcttttcagcagttttctctttgtgcacaatactctcctcctcctcagcctccataaaccttttactccttgtcatcacatctttgaattccgccttgcgattcttttctgtatttgctgcaaaactgttggacaacttgtcagctatctgcttggccagttgtcccacctgaatttcaaggatcttcagtgctgactcagtgcttttat

SEQ ID NO: 300561 - DNA, 395 bp, Glycine max
agcttaagacgacgaggtgcggggaggagcgatctggcaagggaagaaacagagttggaggtgtgagaaagcgaagcttgaacaaattccagactttgcctttagattgttgtgcctgatttttccatgacttccacgcacgggatgcagcaacgtggtcgtcgaccctatctctaaagacaaagcttcagtgtcgggtcccactaactaattctaacaacttaagtccgcggattctagtcttcctattcaaatgccacttcctgctttcacatcccaacttttttttttttgtccttttctaatttttccatttttttataagggtgattatgtttttagtgatgtttttttaaatgttcatttcttttagtgcatgttcccttgtttagttt

SEQ ID NO: 300562 - DNA, 455 bp, Glycine max
  unsure (1)..(455): unsure at all n locations
ctccanagttntcgggttttctaaaccttgaaaacttgtgctattcatcttttcattctcttctccctctgccaaaaagaattcgccaagaactaaccgcctgaattctttttgcgtctctcttctcccttttccaaaagaacaaaggactaaccgcctgaattcttttgtgtctcccttcttccttgtcaaagaattcaaaacgacacaatctgagaattcttttgattcttcctttccctaataaaaagtgttcaaagggctaaccacctgagaattcttttgtatccccattcacaaagtatcaaaggtttaacagcctgagatctttgtcttcacacattggagggtacatccttcgtggtacaagtagagggtacatcaacttgggttcggctgagaacaagagagggtacagctcttgtggatcagttctagtggagggtacatccact

SEQ ID NO: 300563 - DNA, 394 bp, Glycine max
agctttttcattaattataatgtttccatcacacaggaagtatgagagcaaactgaagttgtacaaactagtaacttcacagaagggaataagacctgtcagttagcacatagtctactacccctttacagatccaattcctcgtccccttgcacactgtcactccccctagctgcagaaaatacatataggcctctcaacgttttcctcacatggtcatatacaaaaaccagtaacatagctacaactgccactcttgactcgaagatagttctgaatactgcacaaagctcctctacagaaatttatccctttggcattttgatacttgtcctccactctgagattctgttataattacttcacattaacacaaaacagaacaagttataag

SEQ ID NO: 300564 - DNA, 322 bp, Glycine max
tacatgcgctagatcacaaagaagaacttatgatgatctgtagttttattggagtgcgtgagataaactaatgccgcataagatgtcaatgcacatagcactgactctcaccttgtcgatatggagattatgcgagagacgacattcagaataccgctttgaccaattgttcataatacacatggatatcctctgagagtatgagtctagactgagaaagcacaaatttgattattagttgtctagaccgaagagcggcgaatgctatatcctcttccataaatgcaatgagaagcagagctatactgctaatctacacatt

SEQ ID NO: 300565 - DNA, 379 bp, Glycine max
ataccatattagaaaactcacggatcatatgataactctaacgacatcatacctatggagaccagagagaagatgaaatccacagacggaatgagaacgatataatcgaggtgatgcactcttgacttacaacactctatgtatagagttacgacgctggatgcaatataaggacggtactatgaagcaattagttagttatgacaaccatgaacaattgtcaataactaactataccaactgacacaatgcgcttactacctacttgagatagtgtacttgaatattgcacttctaatgcagtactctaacataaggtaactaatgcttagctatttatcctgaaaagttgatttgccgtaatacactccgttgtacg

SEQ ID NO: 300566 - DNA, 465 bp, Glycine max
  unsure (1)..(465): unsure at all n locations
tagcatggcctctgtgatggacgccatttgatcttttaatgtcgataggtcgcgacttcatcatgtgatctgcactatccgtctctcagctatcccagtctctacagtcgtgcgatcagagatgtgtatanagcggggcgctctgccgcatcttcaacattatcggcgagtttccctaaagacacaaacagaggtgagtctgccacccaaatatgaatatgctcatgaatgatcagagcacttggatngatcccacgccttttccaccactgatggagttaagaactattattagtataaaaaggaacataagctttcatctagccatgatgatacaacagtgcatcacagagcctaaccgggagaatcatatgggccattatttatgatgggttgaaggaatcgattgcccatcaattactatgcggtgacacactctcggatgcctttgcttagctaaacccg

SEQ ID NO: 300567 - DNA, 363 bp, Glycine max
  unsure (1)..(363): unsure at all n locations
agcttttcttccacaacagtgtcgtccacaccgtcctggtcggctgcaagggcccatttcctagtcaagtccgatttaaactgccgccacctctcaccaacagtttgaagaattttcttctttgtcctactatcagaagcttcagggatttcaaattccgcctgaaaaataaaaaattaggttttattgttagtcaattataaattttggctaataaagaaaatcagataagcaaattaaaatacctgaatatactcccaaatcaaatccttctgagcagtagggacttccttccaggtctcgtatgtgatgtcgaccttatcacgagcganaacctccaaatatgttcttaatttcttcttg

SEQ ID NO: 300568 - DNA, 442 bp, Glycine max
  unsure (1)..(442): unsure at all n locations
tcatagggagtcatgctaatggtagagtgaaaactattgttataagtgaactttatcaacggcagaaaactctaccaattccccttttgttctaagacacacgccctcaaaaggtcctccagtgactaaatggttcattcagtctgagggtggtaggctgaacttagcctaagcttagttcccaacgctttattcagactctcccaaaatctagagataaacctaggatcctatcacacacatgctatatggcacaccatgtaatctgacaatctcaataatatatagggaggtcaacttctccaaggaaaatcttatattaatgggaatattgtgagcaaacttggtcagtccatcaataataacctagataaaatctaaacctctgggggtcctaagtagtcctaccacanaatccatggaaatactatcccacttccac

SEQ ID NO: 300569 - DNA, 385 bp, Glycine max
agcttgtagggttaaagtctcacgattgtcacgtactcatgcaacaattgttagccgtggctatacgagacatcttgccaaacaaattcaggttaacgataactcgcctgtgctttttcttccattctatatgtagcaaagccattgatccagtcatgtttgatgagttagaaaatgaggccgcaattataatgtgtcagtaggagatgtattttccccctgctttctttgacatcatgattcacttgattgtgcatctggtcagagaaatcaaatgttgtggtcctgttcatctacggtggatgtacccgattgagcgatacatgaagatcttaaaagggtatacaaagaatctatatcgtccagaagcatctattgttgagag

SEQ ID NO: 300570 - DNA, 419 bp, Glycine max
ttgataaccttcgatagtgaccagtgaggcctaacaaacctctcagctgctggatattgaaacgtgtcagccactctacaactgactgcaccttaatagcatccatatccactccttcaccagaaactatatgtcccaactgctctatcttcaatacaccatcagagcattcagacaacttatcacaaaaaacattgtctttcaacactttcaatactcctccagatgcataagggtccatgccatgtggaactatataccaatatatcactcaataaccataacacatattgccttacagcatgctggataatatggctcatcatacactgaacagaattcgtagcattggtcaaaccaaaaggaactaccaaccactcataatggccatgagggagcacaaaggctgatcatgtcta

SEQ ID NO: 300571 - DNA, 391 bp, Glycine max
  unsure (1)..(391): unsure at all n locations
agcttatgggttgcctcttgtatgcaggaaggctggagagctctccttattctgagctgttgtccccaattcattgggagatgacaaccgaagagctcgcacgacagttctgcactctcttgggtcagtcctatgagaacccactgagtgtagcagttgcagcaggagttgaggggttgcctatactgttaaagctggcaaatgtaatggcagcaaagaagcaggagtggcaggaaatgaagcagttgcctgtgccagttgaattgggtaaggaatttcagttccattcgatttttgtttgccctgtgagtagggatcaaggaagtgaagaanatcctccaatgctgctaccatgcttgcatgtcctttgcaagcaatcaattatgaagct

SEQ ID NO: 300572 - DNA, 421 bp, Glycine max
tgatgaagcgcgtgcgtagggcattataagcattacatggagatcaagactggtttggtgctctggaataatgcagtcatagactcataggactttctttgacatttagtagaggatatttgaaaaaaaattaaaatgttcaaaactgaactaataactgtaagttaaaccacgggattatatatatcttttaagcaaaaatgttgcacgttatcctaattttgggtgctatagatgtaaaaagaaaaaaaaatgaaatactacttgaaataatgtttaaatatttattaagtttcttattactcttttaaaataaaccaatattgtaatatttattttaaccataagctcttgtaattctatatttatacataaattattctcattacaataaagtaatgtcgctaatataaaattattc

SEQ ID NO: 300573 - DNA, 358 bp, Glycine max
  unsure (1)..(358): unsure at all n locations
agcttgcttgatttatgtataaactgttaagtttaatagctatacagtgaccgcaggataaaatagtttatcagttaaacagaaataactatttgtgtcttttaagaaaattattgtaaaattaataaatttatcatatatagtgatttgtaattagataataacgtaaaatgactntatactcctgcataattgtaagtttgtaacctatttttcttataaactatagtacctttttggtaccaagtatcttaagaaattagtcatttttttctatgcttgtgatgtggagaaatggccaccactggggagaaagagtggtatttctactgccccagagacagaaagtacaggaaca

SEQ ID NO: 300574 - DNA, 448 bp, Glycine max
  unsure (1)..(448): unsure at all n locations
tccattttttagcatttgcatgaagggtgtctaacacagatccaatcagcagtctcatgaatgagagaagtccttcccccatcttctactatgaatattattgtgatgaaaattatatttctgataaactagtcaaggctccccatggtttagctaaagcagtatcaagttttaacattttcaattagttgattgaaactttgtaatcagccatagcaaccgtgagtcgcgatttgccatatttcacagtgatactgcaaacattntagaaacctaatctctatctaatcttactgtagttaatccatatctgtggttatttgaaactctntaagtatgcactcttgaaatctccttttacactataattagctggatgaatatatncttgcccctcttcaacaaattacaaacactcttcatctgtcaacttcaggccatctactat

SEQ ID NO: 300575 - DNA, 341 bp, Glycine max
  unsure (1)..(341): unsure at all n locations
agcttgtctcagcgtttatgcgagacagagaccaacatgttagctatcatcgccaagtaccaagaagagttgggtctagccacggcccacgagcatagaatcgcggatgagtatgcccaagtatatgcggaaaaagaggctagaggaagggtgatcgactctttacaccaagaggcaaccatgtggatggatcggtttgctcttaccttgaacgggagtcaagaacttncccgattgttagccaacgccaaagcgatggcagacacctacttcgccctcgaagagaatcatgggcttctcgctattgtcagcatatgataaacttaatggcccacataatt

SEQ ID NO: 300576 - DNA, 450 bp, Glycine max
tcaagaaaaggcgcaaactccttccacaatctgatttcaggcttaaataggtggctatgttcatgctcgtgcgcttagcgcacttctgaaccgcttagcgcgcattagtgaacttcgacttagcgcgacttttcttggtcagcgaatggactgaagcggtgcgcttagcgggatggcccttcgctcagtgagcatgcacaactcatccttctttcagattcttctcgcacttagccaggaatgttgcgcttagcggatggctcactaagccattagattggcttagcgagagggtgaaaatcaacacttcacaaactcgtctaattaacctgacattgagagaaaatgattattaaacacacaaaatggaagtactaagtatttattacctatctctacccacacataattacaacactacaaaataaccataaattggaggagtttgat

SEQ ID NO: 300577 - DNA, 376 bp, Glycine max
  unsure (1)..(376): unsure at all n locations
agtttaaagacaagagctaaagtaaaaaacacttggtttatacttgtgcactcaacttgaggtacgtncagttctcctttacaacctataaaaggttgcatttaatcaagctgattacaagaagtattctgacctgcattcctgactacaacaagtattctttaggccacttttgacacacaatctccccctgagattaaaaacacccaaatattctttgatcattaagctactcctagctttccaaacaattgtttgaatgaatacaatatttaaatctctcaaagagaggatatacactaagtttgaatacaatagataactntgctaaagccaagattgatacttattgagttntatttttgaacatccaaca

SEQ ID NO: 300578 - DNA, 433 bp, Glycine max
  unsure (1)..(433): unsure at all n locations
ntngccatcccttggataagtccatttctatggacataattgcaccaaaaagttcagtataaagggaggtttgaacaccaaggtaggtagcaaaactaccaagatcgagcaataccattgcaatctttgaagattccaccagctgcagcttgaccaggatttccgtgagaggccacatcgatgttgcacttcacccaagaaggaagaggtctatgccacgttacctaacaataggcggcttctgggaaggtggcaaatggtgttaaattgttgcatcatattgaattggtcaatggacgaccttcattttccatgagacaggttactgaaagagaaaccgaggcatggatcacagagataatatgtgcggacaattganactgggtattgaatctggcgttgtttctagcacaccacattccccacattgaat

SEQ ID NO: 300579 - DNA, 398 bp, Glycine max
agcttggtggtactatagctgcactaaattgttgctgtggtaatcaaatgcagatgcaatgcagtagaagggggtaaagacaatatattactacaattatatgaaattgagtaggtaatactaagaacagaatattagtagcatgaccgaaaataaaatagccgctgtgtcaaataacataacaattgtctcaaatacaggaaaaaaaaatactccaacgccatcattagccgttttgacttattgctgtctttaaaaaaaatgttgcccatttctttcgaattgtggtgatgatgtcgatgtccaacggtgtgtcattagcaaaccactgcaagtattcataattgtaagttagtactgcaaatataaaaattcagttccaagtgtactgaagttta

SEQ ID NO: 300580 - DNA, 459 bp, Glycine max
tcacctctatccaatcttgacgaattcaaacatgatcaacacagtgatccttgtaagaccaaataaaggaaacatcaactagacttcctccaaatggacaaatcgtatcaataactagccctacttgtggctttagctgttgctattgttgtcacacgttatcacaacacacacattccgacgcagtcacactacggcttctctcatatgcattttcccctagatgcaaggggacgcataggggagcatgtccagtaacatacaatatatatttcgtgtgagccatgatacgaatgaaataaagtgaaaaaaataagtcaataatccttaataataaacaattatacttaactaagacaataaaattaaaaacattacatttgtctaaaaaaataataaacatgaacagatttatgaattgaaaataaaaaatttaactaagacaaaaataatacacat

SEQ ID NO: 300581 - DNA, 392 bp, Glycine max
  unsure (1)..(392): unsure at all n locations
agcttctggtgggacatcttgacttgctttccaatctgacattcaccacagattctgccttcttctattcccacattgggaatgcctctaactgcacctttgtcaatgattttcttcatgcctcttaagtgcagatgtccaaatctttgatgccatattctgacttcatcttctttggaggatagacatgtggaggagtaactggtttcttgaggtgtccataggtagcagttgtcctttgatctgctgcccttcattagaacttcactcttctcatttgtcactaagcattctgactntgtgaagtttacattgaatccttcatcacacagctgactgatgctgatcaagttagcagtcagtcccttcaccagcagtactctgtccagact

SEQ ID NO: 300582 - DNA, 471 bp, Glycine max
  unsure (1)..(471): unsure at all n locations
tagagcaatctgaactttccaagtgatcaccaaaggcttctgcatcaacattgacactctccaccctctntgctttaagcttttgtgctgcattccctgcttcctccttataaatctcagatttattagaggttgcagcagcacaatcaagtgaatcatgatgtctctgaccagatgcacaatcaagtgaatcatgatgtcaaagaaaacaagggaaaaatacatctctaactagcacagtatcttgcggcctcatttccagctcatcaaacttgacaggatcaatgacttttctacatataccatggaagaaaaagcacaggtgagttatggctaacccaactntgtttggcaagatgtctcgtatagccacggctaacaattgttgcatgagcacgtgacaatcgtgagactntaaccctacaagcttaagctccttgaactacacaaggctcttaatatttgaagagt

SEQ ID NO: 300583 - DNA, 394 bp, Glycine max
  unsure (1)..(394): unsure at all n locations
agcttttcgattcaatctatgtacccgtagtggtccacattgtgtttcgtgcatttttattctcgttttgtttactttttataccccctcttgacgtgcttgagccattttacttaagtcatttctcgcttaacttaaaaataaaataaatttccaccgaacttttgaattgtattatccattaacttcggttaaaataaattccgaccgttcggtcgtgccgtaaccacgttggaaatcaaaaagaggtaaaaaataatataataatcaaaaagacatctttagtaaaataaagcgaanaatcaatcgggcgttttctctttgggatttctcattcttaatcgaattgattaataactaaagtgaaactaaaggctaaaatcaattcgcctag

SEQ ID NO: 300584 - DNA, 456 bp, Glycine max
  unsure (1)..(456): unsure at all n locations
atntgcagtacaaacatgggaccaactcattntatttcaaaaaaaaggttgtatctagtcaaggtctgagagaccatacaagtttcctagcgatttctaattatgtgggccattaagtctatcatatgttgacaatagccgagaagcccatgaatctcttcgggggcggagtaggtgtccgccatcgccttggccttggctaacaagcggngaagttcttgactcccgttcaaggaacagcaaaccatccatccacatggttgcctcttggtgtaaagagtcgatcacccttcctctagcctctttttccgcgtatacttgggcatactcgtccgcgatcctatgctcgtgagccgtggctagacctaactcttcttggtacttggcgatgatagctagcatgttggtctccgtctcgcataaacgctgagacaagctccttttggaccttgaaca

SEQ ID NO: 300585 - DNA, 394 bp, Glycine max
gagcttctcctctattttcctatgaatagggggagaagtgaagggaatataggttcacccctcctggtaattcgagatcacttgaacttagtgaactaaattggttccgtgaagaaaatccaggccgaggcgcttccgtatcgtatccgtaatgttgtcgtgggagatttcgcgaagatgttcaaccgctcttcgacgttcttcggtcggtcgtcgacgttcttcggtcttcaactggcaagttcccgaaatcgaacttttcaattcattctatgtacccttaggggtgctcatttgttatcacgtgcttttattttcatttcatttacttttcgtacccccttttgacatgctgtagtcatttacttaagtgatcttctcggctaatcaaaaa

SEQ ID NO: 300586 - DNA, 423 bp, Glycine max
  unsure (1)..(423): unsure at all n locations
tattgaatntatctctatagagtgtacaacaacgagagagatggactagcaaatcaagacaagcttcattgtgggagaaggctcatgaacgtaatgctaagcgtgttctaaatttgataatagagatggaaggcttatgggttaaacttgggcaatatatgtcaacacgtgcagatgtgcttcctgctgcctatatacgtcttttgaagcagttacaggactctcttcctgctcacccttggaagagtttttcttcaattttttttattttaaaaatattctagtttatgttatggaagaaaaaatgcttttaggaaacaatgtacattatgtggctgtaataaaaagagccccacatattctntgagcattgtagatgattgttgttcattaacctactacaacaattcaaagtcttttctt

SEQ ID NO: 300587 - DNA, 390 bp, Glycine max
agcttgtaattgattaaactgaaacaaaaatatctctacaagttataaacacttgtgtaattgattacgattagccttgtaatcaattagaatagagttttatgcactaaagaaagtttctaactttagaaacaatcttcttactcctacatgatggtgcatgatgtacatgtgaaaagatagagactaagatgcaacacagaatacaacaatcaatacaaatgtcactcaaaagagttggtcatgctaaagacaaaacttctgcaagcttcttcaagctccaagacttagtcttcatgctgctgcctatatctctaacaatcttctctttcttggctttcatgatgccaaacttgaattatcatcttagtgcatttggagagtcttgat

SEQ ID NO: 300588 - DNA, 370 bp, Glycine max
  unsure (1)..(370): unsure at all n locations
ntagtgactgtgtgcaatcacaaattgtacattgtgtgtcctcattgatatgtgtctatagttggcttggcatgaattcctaattgtcataacatattattgatggatatgatctacgcattctttctttcttcacattnttaagccacgggccaaatagctatcccaacgtatattatttctatcattttgcgagccttatgagccaaacacttgatattttattggccactaacctagacaaaaattttctaccttaccttcggntaggagagcaatggtgtttttgatggcgatttctatcatttggtggctaatgtgatgggaatacactattcttatgggtattaaaggaaattaaatatttatc

SEQ ID NO: 300589 - DNA, 393 bp, Glycine max
agctttgcaacccatatctcttccgcaggccttctctcttgccaaactccaggaggataagttggaggaccattgccgcccttaccgacctcgtcacacacccatcaccaccactccactaccacacccacctctcttaccttcaccacccaacctggcctccaccccttcccattccaaaccccaagttaaacatctaaccccaaaagaaatggcccgcaaacgcgaacaaggcctatgctataactgtgacgacaaataagggcccaaccatcgttgtcgcgctcatttctttttgttgattgccgacaatcctagcaccactatcccactcgaaacctatgttaccaaaccacctatcccaccttcttttgacccaacccatgccctcat

SEQ ID NO: 300590 - DNA, 410 bp, Glycine max
  unsure (1)..(410): unsure at all n locations
ntcccacaagtcctaattgacattntaaactacgattaactcactttagcctccaattaccactaaccccaaatttagcttttcaaaacctcacacttttccactcacatcactaccattctcacatttaaccctaggttaactctccccatcaactctaccagttttctaccaacaatttcagcacacaaacatcacaaagcatcatcataaaaccctaaaacagaatcgtagctctactacatcaaacatgtcaagtttagcatgcttttaacaaattccttcacaaataactaccataaggcataaacctagtagaactacccatcatatctcccanaaacccaatacccacgaaattcatgtgagaagaagtccacccaaaccttanattcgaagtcccacaacgt

SEQ ID NO: 300591 - DNA, 381 bp, Glycine max
agcttatgacaattagaaattctcgagagcttccgatgattaattttgatcgtctcgatatattataagtctgaatcggacctacgtgtgaaaagttatgaccatttgaattttttgagagattccgttgtttgaatttcgagcgtctagatatattatgcgcctgaatttgacttgcctgtgaaaggttataaccatttgaatttctcaagagcttccgttattcaatttcgagcttctctatatgtgatgcgcctaaatcggacatccgggaaaaaagttatgaccatttgaaattctcaaaagcttcggtagttaaatttcgagcatctcgatatattattcgcctgaatctgacatccgtgtaaaaagttatgacca

SEQ ID NO: 300592 - DNA, 417 bp, Glycine max
  unsure (1)..(417): unsure at all n locations
ccttgtcgacacgcggagatttacgtnaactnttgtgctcacaagatttgtcatactgacatttgagtcacgttgacgggcggagataccctagtggttatccgtataaacattcttttttgctgtctgtaaaacgaaaagcctgatagcatgcagagactaacgtcgtcttctgcgcccttcgtcaatcgcggccgacaagcccgttgacacgcagagatttacgtcattcccgcgctcacacatctgtcatactgacatttgagtcatgctgacggacggaaatacccaagtggatatccgtataaacattctttgttcctgtctgtaagacgaaatgcctgatagcacgcagagactaacatcgtcttctgggcccttcgtgaatcgcggccgacaagcccgttgacacgcgga

SEQ ID NO: 300593 - DNA, 387 bp, Glycine max
agcttctaacttggcttggagatcttggccatctttgaaaaactgcatcatgtgtaagagataatcaaagacataaattattgctactcttggtagatgagtgaaaagtggaaagttgctggtaaaaaatggaaaaatactcacgtaggatggataccacatcattgtagttgatggagaagccatgcaagggcaagttatgatgttataaatccatgtttatctaccaacttttctatcttgaaataattgctctcgtcaattctctgccaacacatgatacttccatgtttacattatgatctttctattgaattttcattcatatggtatgaaatattcctacttcttgcttaagtgcaactaggaagtacctacaaatatcga

SEQ ID NO: 300594 - DNA, 370 bp, Glycine max
tcatcactaatttacaagagaaataggaatctatcacagatttagagagtggaccggaaatttatgagtgtatagataataaaatctataaatattatactctaataaataagtttattaattacttacgacatattatagctttttttaattgatcatatgttattctcttcttgacaatagattacaaatcattgatgataattgctatcgaccgatgagttaatttcgtatgacctttccacctacaatacgacaaccttattatactagaaacaaaatgttacataaaattttatattggtgtataatttataatagtcataatgcctgaaaatttgaaatgaacttttaggactattatatatat

SEQ ID NO: 300595 - DNA, 380 bp, Glycine max
agcttgttatgttcttgtcatatcatacatgttatcctacttgcatatcctatcccattggataggagtaaagtttaaatcactttccggtaattaaaaataatttttcctgttttcaaattataattataataatagtaattgtaataattataatgattgttaggattggttgatagcaatatagtttttaatagttataattctaatttaccagaattactagacaatattcacctcactatttccctatttaaatcccttgtgatttgatttctgctattaggaagaaacactagatttttttttttaagattgtggtgagtggttgatgtagataattgataccaataaaaatcttttactatgtcaagttttgt

SEQ ID NO: 300596 - DNA, 433 bp, Glycine max
tgtgattgagaagtgcctttgtagatagtcaggaggaaaattgatgatcctaaatgggtcatggttacttgatgattacctgtcagtccatagtaatctcccagttcagtccagccaggcactatagttgggttctgaagatcttggttgtatttaatacagtgtatcttgtcattactatctaggagatgccaagtatgctctaattcatctttccatcttacgccacagctcctctaacttcaccataagactacatttaaagtgaactaatataagcaatattgataggttatatcatgtcatgtgtaattgagaatagccttgaaattcctaacctgatccttaatgtgaattgtgtcaacatatcaagtgcgtctttgtaaccatcatcataaccttacccatttcattccaattcttctgatcttca

SEQ ID NO: 300597 - DNA, 378 bp, Glycine max
agcttctcaacgaggtgagcttagttatgagagggatatgagtagctaagctctagcttctcaaggaagttttctcaaagaagcttctcaaggaatctacctagtctataaatagaagcatgtgtaacacttgttgtaactttgatgaataaaagtcttatgagacacacttcaaagttccacttctctccctcttttattccttcaattccgtgctccccccttctctctttcttttcctccattaaagcatcctcttcaagctttttatctaaggcacattcttggtggtgaagctccttcttccatggtttattcccttgtggatggtgcctaccctcttctcttctcctttgccttccgctgcatctccatggt

SEQ ID NO: 300598 - DNA, 406 bp, Glycine max
  unsure (1)..(406): unsure at all n locations
nttcggatntggtcttcgctggcgaaattatcaaagtgggcctggaaagaggtaaatctaaccatcctactttgatgaatgcgaaaactgtggcaaatgaagagggtgagaatgaaggagaaacccatgctgcgactgccattcctatacggccaagtttcccgccaacccaacaatgtcattactcagccaataacaacccttctccttactcaccacccattcgtccacaaaagcatccctaaatcaaccacaaaacccacctaccacacaaccaatgctaaacaccacttttagcacaaaccanaacaccaaccaaggaaggaattctgcagcaaaatcttgcagaattcaccccaattttggtgtcctatgctaacttggtcccttatctacttgataatgc

SEQ ID NO: 300599 - DNA, 382 bp, Glycine max
  unsure (1)..(382): unsure at all n locations
agcttgtgcatccaataccctgatgaggatgtcccatatgttcttaaaactggactgattcatttgcttccaaagtttcatggccttgcaggtgaagacccgcacaaacatttgaaagaatttcacattgtctgctccaccatgaaacccccagatgtccaagaggatcacatatttctgaaggcttttcctcattcattagagggagtggcaaaggactggctgtattaccttgctccaaggtccatcacgagctgngatgaccttaagagagtattcttagaaaaaattttccctacttccaggaccacaaccatcaggaaggatatctcaggtattagacaactcagtggagagagcctgtatgagtactgggagagat

SEQ ID NO: 300600 - DNA, 450 bp, Glycine max
  unsure (1)..(450): unsure at all n locations
tcttatccaaggcttgtcttggtggtgaagcttcttcttccatggcttattccctagtggatggcgcctcctctcacctcttcttcaacctttgtcattcttgactccatttcattgaagcgcatatccacttgcatttccaaagtgtcaaacctctcaccaacaaaggttttaagaccatcaaacttttccaaaatcttcgaaagaagagatgaatcttctccccatgtccttctcaccatcatttctagcacccttctttatccaagagccatcatgctccttaatataaccaaaggatgctatgactctagtgcctataaggaatgatctcttgattggaacatacggttcacaatcaagaacgatgttgaagtgttgaacgaaaagggtaacaagatgaggataangcaatgncgcattcaatcgcaatgccttatgcatgtgata

SEQ ID NO: 300601 - DNA, 354 bp, Glycine max
agcttgacaatcaaccctcggctcacaatgaagtgcactgtctgcattttattcttgcatactattgaaaaattatactcatttttttattaaggtctcccttattttaggtcactgtatattcataacatttcacttatttgtaagatcacccttcattcttcttaaatctctttctctattgatgcttaactatgatatgcataattctgcctttgataaatgaattctgcaattcaatctataatatcgacggataatctgtatttgaacttgaaggcaagttagtatcaattacttcaacactcttgtctgggacagatgcatgcttggcaccatagcttgcactacact

SEQ ID NO: 300602 - DNA, 443 bp, Glycine max
tgtaccattgatttgcgtggttgaaataaaagagtgaagcattgttttaatagtcgttttttacatcaatttaatgtctgagaacaattaaagtgattaatattttcatcttataagttacaaagacgaagataatgatttctatcttttaagaactaatgcaatcaacttcaaatcattcaaaattaaagatgatgtttcattcttaaattaatttaaacatttacttgttaactgatagctttttgctagagttgttcctttcataaagatctcgcatcacgaggtttttcaattttcatattcttttatcttttaaaatacgtggttgcgagcttcatagcaatttagtcgttgtatagcataatttagtgtgttagtctttgtcaaaatatagaggaattagtctttattaccatgtggctattatgtgtccacgtaaa

SEQ ID NO: 300603 - DNA, 391 bp, Glycine max
  unsure (1)..(391): unsure at all n locations
agctttttggagtagaaacatgggaccaactcattttatttcaaaaaaaaggttgtatctagtcaaggtctgagagaccatacaagtttcctagcgatttctaattatgtgggccattaagtctatcatatgttgacaatagccgagaagcccatgaatctcttcgggggcggagtaggtgtccgccatcgccttggccttggctaacaagcggngaagttcttgactcccgttcaaggtaagagcaaaccgatccatccacatggttgcctcttggtgtaaagagtcgatcacccttcctctagcctctttttccgcgtatacttgggcatactcgtccgcgatcctatgctcgtgagccgtggctagacctaactcttcttggtacttg

SEQ ID NO: 300604 - DNA, 457 bp, Glycine max
  unsure (1)..(457): unsure at all n locations
ntataagcgcgggttcgggagacaaaggtcaagcgttcgcgatatgcgaagatgatattccgagtactttggatttggtacgaccatgccctcctgatttccagctgggaaattggcgagtggaggaacgccccggcatttacgcaacaagcataatgtaaacctttacggttttaaaagctctatagttgggcctaggctttagagtttttccttttgttaaggctttgtgtctttgtttttgaattataatacaaggatctttcttcatctgttcctggtctctacccattctcattcacttgcatgtttacttctttttctgaaacggcagatccgatgacgagtcccccgaaggtactaatacctgggacccgtctatcgacttcgagcaagaaatgaatcanacggaagatgaaggacatgaggatgtgggacttcccccagaactagaaag

SEQ ID NO: 300605 - DNA, 399 bp, Glycine max
agcttttacaaaaaggttcatcaagtcaagttgaaatatggaagtaaccgtcctgcaagattggggcaaaagatgaatcgagtcacatcactgcttcatctactgccaaacatatttaggattgttgatgtccttgttacttccagtttcaccttgacaaagatgtcatggaccatgttgaaaatctaaattgattcaaccccatatcctgcgtaaaaattcgcaatacttcgactgtacatcattcgcatgcatccatgcttttcattggttgcattgctcattgcattctttccttgaaaaataaaataaaataaaataaaatgaacttatcaaaaagaaaaggacacgctttacggcgcccttaccgaactcgtactagagctagagtaatgggtg

SEQ ID NO: 300606 - DNA, 456 bp, Glycine max
  unsure (1)..(456): unsure at all n locations
tcttcagaaggacgtanattntgtgcttgaccagtcttgtagagaggcatttgaggagctaaggaggaggcttaccacctctcccatcatgcagccatcggattgggagcttccatttgagctcatgtgtgatgcctccaattatgcacttggggttgtttttccgcacagagttatagactatcacatgtcattgcttacgcctcacgcctctagatggagcccaagttaactcaccaccatcgatacgagcttttagctgttgtttttacattagataaatttagatcttattagcttttctcccatattactgtctatactaaccatgcagccttgacgtacctattgaagaagcttgatgctaaacgtagattgatcaggtagatgcttcttcacgagtttgatattgagatcagagacagaagtggtgcacaacatgtggtgactgatcat

SEQ ID NO: 300607 - DNA, 396 bp, Glycine max
agcttgtccttgggaaaccttcaaaatgtgttttggtgaagtaggttcccctccaacaccaaccttaagagcacaacgagatctgcaatatttatgataaacatatgcatctacaaccacccttttgaaatttttataaacagaaagagtgagggcttggagatctcgaatgtgggaaggttgaagagaccaattgaattgggagatgtctcatatgaacatggatttaataaggtggttatggaatagattccatgctcattgatgtcatctttgtctccaatctgaatgtttagaatttcacttggattggtgactcttgaattagcctcgtctagggcttcctccatagatggataagtatcatcctcaaagtcaaagggagttaaaaactaa

SEQ ID NO: 300608 - DNA, 463 bp, Glycine max
  unsure (1)..(463): unsure at all n locations
tgacaatattcacaagactagtggtgagcttagagttcanaatgaagtgatgtcttccactctcaaggagctcaaaacctctaataaagagcttaaagatcaacatgataaacttgagaagaagcatgatgagctcatcactagacataattctctaaaggacaaatacaccacattaaaaattgactatgatagtctcgtggttgctaatgaactcgctcttgagacacatgatctactaaccatgtgttaagtgtgatatagctacatcatgtgatgacttgatcattgaaagcattgagcaaggttctagtagcaaaggcaagagtgtggttgagtcaagcaaccatgatgattatgccaagattaagagtgagaatgagaagcttgcaaatgagaacaagaagctaacaggtttgatggctcttgagaagcaaccaacanatgagtcactcattgaaga

SEQ ID NO: 300609 - DNA, 378 bp, Glycine max
agcttaaaagaataatttctagaaagttatccgtttctaaaacgcacttgaacacatctgaattgaagtagatgaaaactgaactaattttgtaagaaagtttttcactgcaaaattataaaatcctttatttgtatcttaagaaattggttattctaatcttagaaacgtcatttttaaaaataatttcacaaaataaatataaaattttcatgtttgcccaaaatttgtcatattgattatcatcttcagagttggttctcatgtgtaacattaaacttaatcaaactaaattacacataatttattatgttttatgtaatatttatccaaatttgataatgtgattttcaggtttagtgttaattctcaagtcaa

SEQ ID NO: 300610 - DNA, 158 bp, Glycine max
caacatgatcttaataaacatgttaatgaaccaaaactatgccatggcttatgaaacttcacggattgctcaagaaggggacaactattatatctaaacatgcattctaaatcccggatatttggcaggtggttaccaccgtcgccataagtgacatt

SEQ ID NO: 300611 - DNA, 389 bp, Glycine max
  unsure (1)..(389): unsure at all n locations
agctttgcggatttggtcttcgccgacaaaaggatcgaagcggatctgaaaataggcaaatttgatcatcctgctttgatgaatgagaaaactggggcaaatgaagaggatgagaatgatgaaggaatccatgttgaggctgccattcctacatggccaaatttcccatcatcccaacaatgtcattacttagccaatatcagcccttctcattacctaccacccggtcatccacaaaggctatccccaaatcatccacaaagtttgctgaccgcgcatncaatgccaaagcgcaaaccanaacaccaaccaagagatgaagtttgcagcgaacaatcctatagaattcaccccaattcctgtgtactatgctaacttngctccatatc

SEQ ID NO: 300612 - DNA, 382 bp, Glycine max
  unsure (1)..(382): unsure at all n locations
tgcagtcattagaagaaaaagaacatgtgattagaagtatgactgacaatgttagtcagtttgtcagattgattgtgaaagaatgcattgactgtattccagtgagagtgtgatccttaaattttaagagaaacaactatcatttagtactgatttttgcatgattctctgaagtatggactaaatgcatgaattgaggatgatgaaggccatgttttgattgtggtactactttagccaaaagctgaccttgtgcttggatgatttatcccttgcacccagtttgagctgaatgaatgattgattgattgaaccttgagcctatacagtcttagacttctgctaccttgtcttaagttntaggagagcatcatccatagaa

SEQ ID NO: 300613 - DNA, 391 bp, Glycine max
agcttctacttatgtggtatggcgggcttccttcactttgttgtctcaaccgcgagctttgaccaccgcccttccttcccgtgatgcttctctttacatctgcctgagtgggcttatagcctaaaccatacttcccacgatttcctttggcatttatcaggctagttatgtcaccgctgtctttgcctaaacccattccgggttcgtaaccgttccccaacataactcgggccatcattactgctgcatcggacaggcaagcttgcccagagaaggagtccacggaggaaatgcttaccacctcacaagactggaaagcggtttctaatgactcctctgcggcttccacataaggcatagaggatgggcagctcaccaagatgtcttcctc

SEQ ID NO: 300614 - DNA, 451 bp, Glycine max
tataaactctatacaagaatgaagctcttataccacttgttataccagtggcctcaataacttaagagggataggctcaaaatgcagaagaagtagcaatcaatttaaaaatgttctttaaatggacaaaattgattgcaacaaaataaatgagataagggaagagagaatgcaaacacaatttttatactggtttggcaaagtccgtgcctacgtccagtactcaagtacccacttgagatttccactccctttgtaaaaatccgtttacaaagtctgaaccacacagggacaacccatcccttgtgttcaggaatcattacaacttaagagacccttagtcccttaatcagtctctttgaatgagaagaaagaaagaagaattctctcttgaagagaaggatattacaattgaagtccatggagaaactcttaatagatttgcaagtat

SEQ ID NO: 300615 - DNA, 386 bp, Glycine max
  unsure (1)..(386): unsure at all n locations
agcttgcttccattttcagtcatcaaagtcacctcccctatgccaacaatcttgcttgtgacatggttgcccatcttcaccataccaaaatcctctttttgatatgacaaaaaaaaaatccttcatgaggagtaacaaggaaaaatactccagagtcaattatccatatacaataatcagatgcaatattaaaataattttcattaccgataaaaaaaaacattttcatcatttaatgacagagaagtagtggttccacctttattcttcttctttgggtcaattcaattagcatggatagttccagtcttctgatctttcttcaagaatctaccctcaaacttcttatgggctgactntccgtaatagtagaaactaaagccttt

SEQ ID NO: 300616 - DNA, 423 bp, Glycine max
taagccattgtgtaaaaaaagcacatgaacagttttatacccaacatgcctcctcctcacacaaaagtctttgaacttggagtgtaaagtatgcacaagcccaccttgactagtgttaaaattcaattttttattcaaataatgggagcagtattaatcaaactataaaggtcagagagttggcaacaccatgccattaactaaatatcccaaaagcttacagtgttggcgaaagctcatgatagttttatctggcagtagacatacctcagtcctcaagttcccaaaacacaagggaaaccgtaaaaatgaataaataaagacactcagacacctattccatgcttatgaaaatatttctagcatctctgctattgcaaaagtattgctacaaacggcttgcatgcacatcatccaaaccta

SEQ ID NO: 300617 - DNA, 382 bp, Glycine max
agcttggtttgaggtacttacccgttgaagactgaagaaaacgattaacgaacgatgaatcttgaaaaacggtcgagaatctttgcgtaattactcacggaaatgttacggaaacgttacggaagcgcctcggcttggattttcttcacggaactaattttcctcagctatttcgagagagagagaagtgcctaaggggctgaacccttttctacttcacttctccacctatttatagaaaattaggggagaagcttgccacccagctcacccaggcgagcaaggttgcttcctccagaagcaacagccttctggaggaatcttctggagggcccaagtgggcctgattgttatttgcacccccatttttactaaatacacc

SEQ ID NO: 300618 - DNA, 437 bp, Glycine max
tgacttaactcagtattctttgtcctaccaagtcactcttggctctaaaaaaatcaacaagatttgatggaaggttgcacattcgctaatattacatcttcttacacatggatatctctctcagtattttacttttttctctcacgatttagaaggtgtttcgagagcttactatctatatagagatttacaaaattttttacagaacagaatagttcatatcttgatcttccaaacttctctatatatagccttcatcttcaagtatatgtagcctcacaacgggtggatttttcactctgttcttcgcctgaattcttgaggcgattggagcttgcgtcatatatatgtcccttctcatgcgaagttcatgctgatacgttcgtgagtcattgacttcaacaagtgtgtgacttctttcatcatagcacatctat

SEQ ID NO: 300619 - DNA, 376 bp, Glycine max
agcttctgatgagctctaatcagtattttgatttatgagcgacttacatcaaatctcgttatatggatcatcatcatacgaattacacatgtaacccacacgtcgtcgaaccatatgatgctaccaatttgtaattcagttaattctttttactgtaattgaaaattcataattaccacaatgatattcttaattctatgatgctatattattttctgatctattgtaacagttgtagaggttatttattagcttgacttgctgaataatattcattcgattatctctcataattggtttgaattctccttaatttgatcttttacaggactctttgttcttaattataagctttggatctttacatatatatcat

SEQ ID NO: 300620 - DNA, 358 bp, Glycine max
  unsure (1)..(358): unsure at all n locations
ntgagatagcttctggcctgagaatcaattgtgctaagagccaactcggagcaattggtcagtctgaacagtggatcagatgtgctgctgatttcttgaactgtggaccactacagcttcctttctgctacctagggctgcctataggtgttaatccgacaaggaaggtggtgtgggaacctattatcaataaattcgaggctagattgaacaaatggaggcacccaacatatcatggctggtagaatcaccctaactaatgctgtattaacagctctgcccttgctntatatgtcttttttcacggccccttcagcaatgattaacaagctcactaccattcacagaaagtttcttt

SEQ ID NO: 300621 - DNA, 422 bp, Glycine max
tatgcatgcatataataattgtcttatgcattcttaagtgttgtatgtggacgttatctagttctcgtatttaataagaatggtatcaccattactttgtttttactatcatgttcacccgtagtatgtaagattgatatcccaaactatgattatgaaatcaaatttctctatggcaccagatgggattttcacatggacctattacatatcttgactttgaccggccgggtatcgacttcctctttgtatggcattcacaatgcggtttatacatatgcaagttgcttaaaactaagactattgcttaacaaaatttgtacttgaagtatttgacataatatttcttatacaaatatatttgcttgttgcaaaattatctttaaataatacaaaagatagcttcacgtcaccaatcaaca

SEQ ID NO: 300622 - DNA, 379 bp, Glycine max
agcttgagaagaatttgagaattactcaataggttcttgaactaatcgaaatttattaatcgggttcctaattaaataatttttttcaattgaattcttaaacttctatttgttttttagttagggttctgtcatcaactccgttaaggaaattccatatgaaaccttttttttttcacgaactgactccagtttcacttcctgaaactttagagcatgcttaggacaaaaactttggagatttcatatattttttttagtaaaatagttgttctgtgtgtaactatttattgcacatcccaagttgactctctccaattctctcacattgttatctttttctattttccttttcatacacacatttcaaatttgggaa

SEQ ID NO: 300623 - DNA, 514 bp, Glycine max
  unsure (1)..(514): unsure at all n locations
cgccacgcgcgcgcgtggacngttganattggatgccanttactatacacgcgacactatacaatactcgcgcttacacattatnagatgtcctatgcagccactctgagttctttctatgcacgctgatttgaaggaatgtttcctatgcgactaattacactgctaaccgtgatattatcacggataacaattctaatattcctaataaaagtgcatgttgagcacttacattcttattctagaccatcaattatgattcatgaaccacgattccttgaatagaatccccacactcgcacaaattaatgtatactatatatgtaacgtgtctattgatgaatatgtatgtcaatctgcaccagctgtgagattgagatgcaattgaacatcgtttgagctacattggcattatcgaggcgagttcatgctcataaggtagtgagacttgtcattacaaactgacgagatttcttcgctcattcctgacctactccaacccatcatgccttcn

SEQ ID NO: 300624 - DNA, 387 bp, Glycine max
agcttgtgttatgccctggccttgaaatgaggtaacctccactcccctaatcatctttaacattcatgtacaataaagaaaagacttgacatcgagagtatttaagcacctgaacgaacaaacaaatttcttgttggcaagaattatggcataacctctggaaagatgaatcccagactaagagtgagctgaattcatactgatttggaagggtagttgaaatgagaatgagatacttgggtacaattcatcagataaaacaaaacaaggcttcatgaattatgccacccacaaacatatcacaatttataaagcaatgctatcatttaaatgatatcaatatgcggcagtgattcatatgatcacaattttcaaatgaatctttca

SEQ ID NO: 300625 - DNA, 357 bp, Glycine max
ctatacttaactatctcttattttactaatgacatcaatctttattcggtttttaactaccaaatttcatctttgatttcttttctttgttgttgctagtaatcaactactgcccttatctttattagtatgcgacgagtgctagacacagagtaccagacttgtgtatatgatgctgctgtcttaatttttggtaaatgactcgcgtatatgttgtttgacatacatcaattcacgaaccaacacgctttgggaaaccattattgatacatgcacgtgctccgcgcactttacctacccataaataatatacatttgatttacatgatcgatataataatacttaactaattatgt

SEQ ID NO: 300626 - DNA, 389 bp, Glycine max
  unsure (1)..(389): unsure at all n locations
agctttacagatatttatcttctttgattcttgagctatgcatttagagctaaactgttacttggagttggttaggcccaataactgccagaagtacagtagttaaagtcacagaaaaaagtatgaatttgtagcataaaaagggttaccggtagtacctgtaacaattcagaataattttaagatgtttggtctgcggaagggcagcaatgatgctcatgttttaaaacatccttgtccatgaaaataattctaagtaaatgatgtttggtatgcanaaccttctgaaattgagctgcaaccatatnaaaatgttctattttacactatacatatacggcaaacatgtcgacataaattcatcagttcacaatattacactatagctc

SEQ ID NO: 300627 - DNA, 417 bp, Glycine max
  unsure (1)..(417): unsure at all n locations
ntgcaataaaagacaaatgaaataaacacttttttagacgacaattctttataaaaaaaaattgggaacaaaattcatctgttaaatatcttatctgacaaataattcagacgtctacacccatgaataaaatttgggtttataaaataattatagagtatttacatggattcagatagctgaagagagccccanagaagttaaaagtatcatgaattcacagttttagaagaaaacaaatgtgaaattgtacaaatgtacttgcatgatgtaagcctggaattaataagtcgtgaattcccgataaaagcaatgcccatagatcctgttacaaatttagctgtacataaactaatgtttaaaacaatttagaataagcatgcatctgccaggatagcaagtagctaatctgcatct

SEQ ID NO: 300628 - DNA, 393 bp, Glycine max
agcttgaatgcaaactggatgcattggttaacttggtaacccagctggccttgaatcagaaatctgtacctgtcacaagggtttgtggtttgtgctcctctgctgaccaccatacagaactttgcccttccatgcagcaacctggagcaattgagcaacctgaagcttatgctgcaaacatttacaatagacctcctcaacctcagcagcaaaatcaaccacaacagaacaattatgacctctccagcaacagatacaaccctggatggaggaatcacccaatctcagatggctagccctcaacaacaacaacaacagcctgctccttccttccaaaatgctgctggcccaagcagaccatacattcctccaccaatccaacaacaacaacag

SEQ ID NO: 300629 - DNA, 424 bp, Glycine max
  unsure (1)..(424): unsure at all n locations
actacgtacaactttntaagtgactggttttgaagaaattcccaaaagtcacaacttttaagagtttttgttcaacacttgctttgtcaagaaaagttcattgggcaaaaacttgtgttattctatttttcttcctctcctccattcttacaaaaagcttttcaaaagacctattcttggtgactgttttcaagagaaggtcttcttggttacaaacactgaacacaagggaccaacgctccttgggttcattgcaagaagcaggacttgcttcttggttcgcactggacacaaaagcaaacgtcttttgggttcattgcaagaagtgggtataacttcttggttgttatcattggacacaagggaccaacgttccttgnggttcattgcaagaagtgggaataacttcttgattgtaatcact

SEQ ID NO: 300630 - DNA, 361 bp, Glycine max
agcttcgttgatggatgcttgcctgtggagcttctatggaagctggatctttgagctccaatgaagtccttcaatggtgattttccaccatggagatgcatcggatggctaaggagaagaggagaggggtggcaccatccactagggaataagccatggaataaggagcttcaccacccataatgtgccatggataagaagcttctagaggatgctttaatggaggagaagatagagagaacgggggagccccaaattgaaggaattaaacagggagaccgctgaacttttcacgtgcctcataagaattttcttcattaaaggtacaacgagtgttacacatgcctctatttatagaata

SEQ ID NO: 300631 - DNA, 420 bp, Glycine max
  unsure (1)..(420): unsure at all n locations
ttggtttgactgagataatccagtaagaaaaatcttggtcgtgcaaatgtaagattgagagattttggatgagagagagaaaagtgaatgtttatgcaaaaatgcttgggcacgtctgagtgtactgatgttacacttcactaagctatttttgactctctcgcttagcgaaatgttgtgctaagcaaactcgagagacgttcggtttctcaaggcctgtcgcttagcgaacccttgcgctaagctattttattattattattattttttacaaatttcgcagctacgcttagcaccggatcgaaccgnttagggagatctgcagatcagaaaacctacaactctcgctaagccgggctctgggcccacttagctaaaatcatgcattatgagtgcagaggagtgggcgttgagcggaca

SEQ ID NO: 300632 - DNA, 548 bp, Glycine max
  unsure (1)..(548): unsure at all n locations
ctctcccgccatcctcctccttcccacactcttgctaataatatcaatcatatactatcaaattnnncnnaccgcggggntttgattgcatcatgaccatcaaggcgaattccactcggtaccccgagatcctctacagtcgacccgcggcctgcatgcttatcgtccacagcagcaacatctcgagcatcctcatgcataacattcaatgatgccaaaacttctttaaattcagacactaccccaatttcttcaacggtcgaggagtcatcatgagaatcacaccttaaccacacatctgcaattatttctacaatacaatgcgtcaaacgatgatgactcatcttttccccaacctatgcatgccatcttaccgcttctcatacttcttccctttcatattaccataacgcttcttgaagcacataagacaatttgcgtcccccctcagcccaccactttagagaaatttgagtctttgaaacttaatataaatatcccaacatcttgacaaccaaatcaaatcctcaaatcttcctttcactacc

SEQ ID NO: 300633 - DNA, 222 bp, Glycine max
cttcgtaaatctttataatgacctaaacaatttccaacgtcgtggactgacaggctaacaatagttgtcaagcaacatggttctgctcaatgccaaacaaaccctactatgtttgttaagcactctctggatgcaaagacacccctgcttattgttcatgcagatgatactcataattctacgacacgattatgatcaaataaattatctgaagaatcttct

SEQ ID NO: 300634 - DNA, 387 bp, Glycine max
tgcttctaaattaaatgttcccagaaacgtatcctataaacaaagaacgttctcttcctgtgtgatagatgttctcgtttattttcaactgttgtgatctctcctcctttttttttgctctatgtctctccttttctccctcgattttcttgatctttatttatagtaattcctaacaacttatctaatcatttcactgcacatttcttatcttattttatcatatatatacctataagataaatctaataatttatcttctttcatttatcttatattcttctcagatcaaccactatgctcaataatagcacataaactaaatatattattttatcttatctaaatcatatatatatattctatcctaccaaatatattatttta

SEQ ID NO: 300635 - DNA, 331 bp, Glycine max
  unsure (1)..(331): unsure at all n locations
tgaactatagntactccgcttgaatggtgattttncttttcttaaaaataattcttgtgttttgaaacgggttggctgtctagaggccagttgacgctgtgtttcattctgattccttcagcgatgtgcatgtacgcgttaatcctgtttatgtccacactcttcctttagctctttcaactggggtccaccatgcatcctttttgccacccttagtggaagttcctatcatatcatctttgatccctttatatcataactgggatccagttcttaaaatattncttttacgccccccttcatttacttgctgacagattttatttgatga

SEQ ID NO: 300636 - DNA, 381 bp, Glycine max
tagcttggagggatttatggggacccggtgttgagaggaacgaggataagggctacgtgggagtacgtgagctcagctgaaggtgggcaactggggatggtggatttttgtgtgatttgtggatgtggagagtcgacttgcaccatcgcccgatcgccacctattaccacatatgacgggtaccccataatcctacaagcttgaagtgagaaagtgtggaagagtcagtcttcctacttttattcgttgaccacagagtggtacatggagatatgtccgcgcgtcacgcaccttgtggacgtcaagtggtgtgctatttcccaaaaccaagcttgaccaatccacacccaacctcgtcatagtcagtcagtgagaacctgt

SEQ ID NO: 300637 - DNA, 308 bp, Glycine max
  unsure (1)..(308): unsure at all n locations
ttccacgaagaggtctanaagagacgcctcttcggaagggtccagtgacacctccgagttcgatagccaccgtttctggagcgtacagcaccatcagcgcttccaggtcatcaaacgatggtcgcttcacatagagaggcgcattccgctcacggaggatgagtctacagactttcacgaagagatagctcgcacacattggacgtccctggtgactcccatggctaaccttgacccatagatagtcctggagttctatgctaatgcccccccacccacgaggcgtgcgagacaatgcgttatgggtg

SEQ ID NO: 300638 - DNA, 387 bp, Glycine max
agcttgggatctaaactttgcggtccttgagcggcattgaggtggtgacttgggaaccctagacagggagtcgaagagtgagagcacaagagagttgagggaaaaatgaaatattaaaaatagtgaaaaatattttaagatggttttgtataaaccatcttaaaattgcaaaactgtcgtaaagctattgcatttatttacaaaaatgtcactagacacattttccactcctgaaaatcaattgatctacattttaaattttaaactaactataactcctttctattttaagggagcactatcatcaattaattttatctaccacaaaccatttaaatatcagaaaatcatagagaatattattttatatttattaaattaaatatg

SEQ ID NO: 300639 - DNA, 407 bp, Glycine max
tcatggtaaatcaagattgattcaaggagttttgatgataacaaagatgatgacaaaaagctcataagtcaagatcacttcatgataacaaagatgatgatattcacgaatgagtttaagattgagtcaagaacactttaaagatcaagaggacacttgatttcaagaatcaagaatcaagattcaagattcaagattcaagaataatcaagatcaagattcaagactcatcgattcaataatcaagagaagacttacttaagataagcccacccagtttttcaaccattgagtatcacaagaagttttcacaaaatcattaccaaagagttttactctctggtaatcgattaccagactatagtagtcgattaccagtggttttaaaacgttaagactttcacaat

SEQ ID NO: 300640 - DNA, 383 bp, Glycine max
  unsure (1)..(383): unsure at all n locations
agcttgcttatggggcttctatggaggctggatctttgagctttaatgaggtcctttaatggtgattttccacaatggagaatcatcggaagacaaaggagaagaggtgagaggaggcgccatccactanggaataagccatggaagaaggagcttcaccaccaagatgagccttggataagaagcttggaaggatgcttcaatggaggaaaagaaagagggagagaaagagagaggggggtgcacgaaatggaaggaataaaagagggagcacgcggaactttaagtatgtctcacaagactctcattcatcaaagttacaacaagtgttacacatgcttctatttatagactacgtagcttccttgagaagctctcttgag

SEQ ID NO: 300641 - DNA, 418 bp, Glycine max
taagagaaacctactcttagcttcaaatttgaaacacctattctagcatgcagtaaaactcttgcatatgtcgtaacaatgcgtaaaaagcatatgaaatagaatcaaggagagatacaacctttacattctaatgcaagaacaacttgattgaatggacctctcttgatctcaagtgtgtttacaactcactaatcacacaatcttgagagaaactttgctttagaaatctctaagaaacaaaaaccgaagtttgtgagttgtaaaagttccccacagattgttgactcgagaacacaaggagggtacatgtagagaagatagttataaccggttgtcatcaattattacgtgaacgtaatcaattgcattctccatttaatcgattaatgtgtccttcccaaatactagagaacat

SEQ ID NO: 300642 - DNA, 389 bp, Glycine max
agcttataagaacaaaattgccttaatcatttccaaatatgcatgtgaattaggacgcatcaacaagaatcaagccaaggctattgtgcaagcaatcaatggggcaaaacacaccaaatggttataatgatggatggctcaaattctcacaaaggtaaaatcatcactttcaaattgagctttcaaaactatcatgacatgtagagaagaatcaaggatttcaagtcacaaaatgtcaagaacttttattttcaaaacaattacccatttcttgacatatcctataattaaagaaaaacatgcaaagtcgtacgtgcacacgaaattgacccaaaatattaaactgaaaatctgacgaaactaacaacattaacaaattaacacaacta

SEQ ID NO: 300643 - DNA, 235 bp, Glycine max
tatacccattctttaacatatctcgagctgccatcatagaggtatcatgcaaacgtggttgtattgaacgagactccacatatacactatctacaatttgcaacgctggaaacgatttatctaatgactcctgtattgctctaacataatgcattgaagatggacaccttactattatgtaatactaagctgaaactatcacaagctgacccccatcacaaattttaatttctta

SEQ ID NO: 300644 - DNA, 382 bp, Glycine max
agcttttggtatcaattacgagcgtctcgatatactacgggacataatcggacatgcgggtaaaaagttattgttatttgaatttgctcatacgttctgttttcaattacgatcgcctcaatatattatgggattcattcggacatccgagtaaaaatttattgccatttgaatttgctacgagcttccgatttcaattacgagcgtcttgatatacaacgaataacaatccgacatccgagtaaaaagttattgtcgttagaatatgcctccagcttctgtttcaatcacgagcgtattgatatattacgggactcaatccgacatccgagtaaatagttattgccatttgaatttgctcatagcttctgttctcaattac

SEQ ID NO: 300645 - DNA, 383 bp, Glycine max
ttccttgtcccttgatatatttgagggacttatggtcattatgaatgacaaattccttgggataaacgcagcgttgccatgtattcaaagcccgcactaaagtatacaactccttatcataagtcgaatagttaaaggtaggaccacttacattttcacataaaataagtcattagatggccttcttgcattcacacagtcccaatcccaacatttgaagcatcaaactcaatctcaaaagattcctgaacagttggtaaccccaccatcggggcattcctatcttttgcttaagaaaattgaaagcttcttcttgtctatattcccatttgaaaacaacatttctcttgaccaccttattgagaggtgctgcaatgtgccta

SEQ ID NO: 300646 - DNA, 393 bp, Glycine max
agctttgatctaccaccaccgcagccaccgtcatcttaattttctattatttaatattactagtacttctctttctagccgtgtatttggctatattaagacatttggataatttagtatttctttatttgcatggtttgaatgaacaattatgaattatattatatgactatgtgtttcatattttttaattattcatatatgttttatttgaatattatgaatgactttttggattataagacattctatgaagtattatctttctaagattgatgaatgacaagttatctttttgattgttttctattcttttgtataacatttatgtatggtttttatatttcttgcctttctaagtttgatgaatggttaaattatcttgtttaattg

SEQ ID NO: 300647 - DNA, 400 bp, Glycine max
  unsure (1)..(400): unsure at all n locations
ntntaaatntatttacgaaaaattgggatgttacaatatctattcttgaagtttttaaactttatacaagaattctgctctgataccacttgttggatgtcgcaacctacccttcggcgggagggcgaagcgtgactcgtgggatgcgtgttccacaaaaggaatacgcgcggagtcgccaccaacgtttatttgaggaaaatgtcggaaaaaccggaaaatatgcgatctacgaacttttaagtgaaaggttcgggagttgtatttacgcacggngaacgattagcaccccaacgtccgtcccaagggacgacagcctttaatcgaatgtgcaaacatgactctgattctcttatgttccctctttatgtctttatatcctntataccctttttatatt

SEQ ID NO: 300648 - DNA, 395 bp, Glycine max
agcttgcctgtccgatgcagtagtaatgatggcccgagttatgttggggaacggttacgaacccggaatgggtttagggaaagacaacggcggcatgactaacctgataaatgccaaaggaaatcgtgggaagtatggtttaggctataaacccactcaggcggatataaagagaagcatcgtgggaagaaagagcggtggtcaaagctcgcggttgaggcaagaaagtgaaggaagcccgccctgccacataagtagaagctttataagcgcgggtctgggaccgaaggtcaagtgtcgcgatatacgaagatgatgttccgagtacattggatttggtacgaccatgccctcctgatttccagctgggaaattggcgagtggaggaacgcccc

SEQ ID NO: 300649 - DNA, 421 bp, Glycine max
  unsure (1)..(421): unsure at all n locations
ttctcataagtcctaaatgacatttcaaactaggattaactccctttaacctccaaataccattaaatccagatttggccttccaactctcaaagtctcactctttttccactcataacactacattatcactttctaaccctaggttaactctacccttcatccctagcagttttccatccacaatttcagcacataaacatcacaagcatcatcataaaaaccctaaaactgaatgggtaagcttgactcacaccaaacatggcaagttcaacacgcttcaacaaatctcttccaattaactatcacaaagcataaaccaagtaaaactacccatcatatctnccaaagccccatacccacgaanatttaggtgagaagaagtctacccaaacctgagatnttgaggtcccacacgtag

SEQ ID NO: 300650 - DNA, 387 bp, Glycine max
  unsure (1)..(387): unsure at all n locations
agcttctcaaggaggtgagcttagttatgagaggggtgtgtgtagctaagctctagcttctcaaggaagttttctcaaagaagcttctcaaggaagttttctcaagaaagcttctcaaggaagctacctagtctataaatagaagcatgtgtaacacttgttgtaactctgatgaatgagagtcttgtgagacacaactcanagttcaacttctctccctttttcttccttcaatttcgtgctccccctccctctttctctccctctttctttntcttccggaagcatcctcccaagcttcttatgcaaggctcatcttggtggtgaagctccttcttccatggcttattccttaatggatggcgcctcctctcacctcctttcctt

SEQ ID NO: 300651 - DNA, 410 bp, Glycine max
tgagatgaggaagtgtagaagggtgaaacttcctgcttttatttgttgaccacagagtgatacctggagatatgtcgcgggggtcaggagaccttggggacgtcaggtggggtgctattgcccaaaaccaagcttgaccaatcccgacccaacccgggcatagtcggtcagtgagaacctgtgatgtacctaaacaggcgagctcctggcagtcaacagataaaaggaacaaagaccacaaagcaaggaggcttgtggtggctggccagctgtgcacttgattgatatgtgcatatggcctctggtaatcgattaccaagggtgggtaatcgattacaaggcttaaaaatgaagataggaggctaagatggtctctggtaatcgattaccaagggatgtaatcgattacc

SEQ ID NO: 300652 - DNA, 385 bp, Glycine max
  unsure (1)..(385): unsure at all n locations
agcttgtatgattatggggtacccgtcatatgtggtactaggtggcgatcgggcgatggtgcaagtcgactctccacatccacaaatcacacataaatccaccatccccagttgcccaccttcaactgagctcacgtactcccacgtagctcttatcctcgttcctctcaacaccgggtccccatcaatccctccaagcttccacaacatccaagcaattccacatccaaacatcatgaactatcaaaaaccaagaaaacagggcagatgcataaaantcccccaaaacacaaccaataccacagctttccttactcaaataccccagtaacattcttttcgttccaattcgttcaccgttggatccactcgaaaattttactgg

SEQ ID NO: 300653 - DNA, 417 bp, Glycine max
  unsure (1)..(417): unsure at all n locations
tctatagaaggttcgttcctaatttctctacaattgcatcacctctcaatgagctggtgaagaagaatgtggcatttacctgnggtgaaaaacaagagcaagcctttgctttgctcaaagaaaagcttactaaggcacctgttctagctcttcctgacttttctaaaacttttgagctagaatgtgatgcctctggagtgggagttggagctgtattgttacaaggtgggcaccctattgcttattttagtgaaaaacttcatagtgacaccctccctaccccacctatgacaagagctttatgccttaataagagccctccagacatgggaacattaccttgtttccaaggaatttgtcattcatagtgatcatcaatcacttaagtacattagagggcatagcaagttaaacaag

SEQ ID NO: 300654 - DNA, 370 bp, Glycine max
agctttggagtttccaagtgccaactcgtcttcttctttagtccagccttcttctggcttcaattcttcagtgggctttccttctgtgtccagcatcttgggatgttcccagcctttgatgacagctttccaggttctgctatccactgatttgaggaaggccaccattcttgctttccaatattcatagttgcttccatcgagaattggtggtctgttcactggtccgccttctttctccatgttcatcagaatttatctccctagatctcactatgctatcccgagcgtcgctctgataccaattgaaattctgataccacgggacagatgtcgtaccggatgtcacgacatcacgcttcagaacatg

SEQ ID NO: 300655 - DNA, 421 bp, Glycine max
  unsure (1)..(421): unsure at all n locations
tgaaatcgaaaacggaagctctaagaaaagtcaaacgacaataccttttaactcgtatgtccgattgagctcctgtaatatatcgagacgctcgaaattgaaaacggaagctctaagaagagtcaaacgacactaactcttgactcggatgtccgattgagtctcgtaatataccgagaccctcgtaattgaaaacaaacgctctgagtaaattcatacgacaataacttttcactcggatttccgattgagtgccatcggatatcgagacgctcgtaacgcacacggaagctctgcacaagtnaaacgacaataatttttaactcggatctatgatggagccctttaatatatcaagacgctcgaaattgataacggaagctctatgaaaagtcaaacgaccataactactgactctgat

SEQ ID NO: 300656 - DNA, 392 bp, Glycine max
ttgcttcaagaaaaggcccaaactccccttcaaaatctaatttcaggcttaaataggtggctttgttcgtgcttgcgtgcttagcacaattttgaaccgcttagcgctcattagtggattttggcttagcgcgtgcttttctcgctcagcggatggactgaagcggtgcgcttcgctggatgacccttcgcttagggcaaatgcatagctcatccttcttccagattcttcctcgcgctcagccgagcagtgttgcgctcagcggatggctcgcttaagctcatattggctctcgacacggtgaaaatcatcacttcacaaacttgcctaatttacctgacattgagagaaaatgattattaaacacacaaaatggacattctaagtattta

SEQ ID NO: 300657 - DNA, 238 bp, Glycine max
tgtatagatgtgtatgtgctaagtcgagatcttgtctcgctattacgcaattagctctctgacggacaataatgcttagagaaccatgctcgcttagcccgtatgacttgtcagctaagagagggtgtctcgcttagccagagtctggattttcctgtagatgcactaagcgcgccctgcccgctaagcgtatcagcttatattctgaaagcgcgctaaacccgatgtctcgctaagc

SEQ ID NO: 300658 - DNA, 393 bp, Glycine max
agcttcgacccctccgtcggaaacctagtccagaacttctccttcggatcaaaatcaccctgcttaagctcccgcaaaatcgaagcctccttcccaacagtgtacctgcacaaattaaaagttaaaacccaaaaagcatctaaaattctcaataaaatcaaaaacaaaaagctctagtgcttcattcaccttatccccaattgcagattaagcatcaactcataattcttatgccccttggaaactgtttatccaggtcttttcacctcgctcgagaaaaacaacggttcctctcatctctttctctatacaatccgacgtcgttccgtcgcggtaaaacatcgacgccttcacattatcgataatatcgcacgtgatgtcaccggctccacc

SEQ ID NO: 300659 - DNA, 243 bp, Glycine max
ctatcaaaggcttggcaagacaggtagttgtggatgcattgacgtacacaacagtgacatcatgatactgtactatctatgcacttaaaacgactctattaaagggttaagactacgctactgcatatgtgatctgagatgagatctaccatttatacctgccgaaaggacatacacaatttatgcaccttatcaattatgacgtactcattacctacctctgacttgaaggtgatacatgac

SEQ ID NO: 300660 - DNA, 534 bp, Glycine max
  unsure (1)..(534): unsure at all n locations
cctctcactctacctgtgaccatatttgataatacacgcatcgaagcacacgacatgaccaannnnnaanacagccgagcggtgattgttgcctcgacnaccanaggcgaaacgagctcggacgccgggatactatagagccgacctgaaggcatgcttgctttgaaatgggatttcgtccaactctttccgatgttcgtataaagcgcaatgagcatagcgaatatacatgctgcatctgcaaagctatgcatgcatgcatacgtgcgccttaatacacacttcaatcaaaacgaggagaaaactacttcttctgtttgagaactcgtaatacattaaaatactacacatttgcagacactaccttccgtattctcaccttgaaataagatcactcataaaaacgaagaaccacgtgtgtgagtaacaatcgcccngcccagccctgatcatcagttgtgataaagaatatgctaaaacagagtacgcccgcgtaccattactgctgatcgatacaaaccatagggatgcccc

SEQ ID NO: 300661 - DNA, 383 bp, Glycine max
  unsure (1)..(383): unsure at all n locations
agctttcattcagtgagaatttatccacaaattagactccaaagtttattaaaacagattaaaaagaatctattttaacaagctcaaaaagaagaaattaacattcacacttagagaattgagacattaaaggtattcataagaagaagctcttcagcctatagtaacttctgtataagttgacttgatgtttaaccttaaagtggtggcagcacctccgtatccctcagtcgccgccgccacaggctgctgccggagtcgttggcgaagaagaaccgtgatcggtggttcatggcaccgagcaatggagggtgtgataatggggtatggaagtgtagtagtttgagtggagaagctntcaatctcaaaaagatcagaacttg

SEQ ID NO: 300662 - DNA, 405 bp, Glycine max
gtaggaagtttgtttttccgaggtctccacccaaacatgttatacatgctgcttaatttgttgccgggactaagaatgcttctccaaatatatataatatctcaaggaacaaggctctttcaagtatttgcgtcaacctttgtactaaaagttacattatctaatatatatatatatatatacatatatatatatatatatatatatatatatatatatatatatatatatatatatatatatatatatatatatatatatataatacgcccccccccctataccgcgacatatatgcgattgtgcgatttattcacatgtgtggcatatcaatgctccggagacactgcgagagaaaacacccgatcctcgcattacgtctatgtattgcgactgacacgaggc

SEQ ID NO: 300663 - DNA, 364 bp, Glycine max
agcttcaacatcagaccacttccagggtgctggaactacttcacatggacttgatggggcctatgcaagctgaaagccttggaggaaagatgtatgcctatgttgttgtggatgatttctccagagttacctgcgtcatctttatcagagagaaatcagacacctttgaagtattcaaagagttgagtctaagacttcaaagagaaaaagactgcgtcatcaagagaattaggagtgaccatggcatagagtttgaaaacggcaagtttatcgatcctgcacattgaacgcatcactcatgagttctctgcaaccatcacaccacctcaaaatggcatagttgaaaggaaaaacaggactttgc

SEQ ID NO: 300664 - DNA, 366 bp, Glycine max
tgatataaactgacgaaaagaaagcccttgtgaacgttttggacatgatagctaataaaataatacatgacttgaaagtctcggattctaaaacttatccgttgtagaacgaataggggtgaataacgacggaaaaacttcacggatttgctcacagaaacgtcttggaaacacctcaacttggatattcttcatggaaacacttttatttcacccaaaacagctgatatgcatagactactgtgttagggatattaggaacgacattgctcccctactcatttgatcccggggatgacgttgctgttcatttttgccaggcgatatgggttgactactctagaaacatgcccgtctttatatatc

SEQ ID NO: 300665 - DNA, 386 bp, Glycine max
agcttcctcatggtggcttattgatgtgattaagaataaaaaattctttgtgttctattgcacctgcgaattatagtaatgtacgaagaggtatcaacacacctcttgactcatagcatgttaatagttagagccaaagtatggtgtttgattaggtagtaacgcagggtatacaagtcttaaagctctagacagagtgaaagttttgcatctcccaccatacctattaactattattgttaaatcggtttcaatattaacttgaaatgattgtcccacagtgcgcaccgcttatgtttattgaataattgattcagtagcaaaatgtcatgcatcaagctattcttgtcaaaaggtcccatgacagataatttttaaacttctat

SEQ ID NO: 300666 - DNA, 209 bp, Glycine max
ttaagcttagagatatgttgtcttcaactacaatgaacctatcttcagacaacacagagagattttgtttcttgaacaacctttctttatcactatccgtgatgatacatgaggcacgacgatccgatagtgctctacaacgctactaacaatgtatcttccaactcaaatgccactcaatggagcttggcgtgtgagagcctatgact

SEQ ID NO: 300667 - DNA, 376 bp, Glycine max
agctttatcttcacagaaatcgtgtgatttttttttctctcggcgagacgattgtgcctaagaaaatctcgagtagttgacatgcgttgcggttcacgccgacgggaacgggtgacaaccagaggattactcccgtcctgatggaggctattagcggcttaatcgaactgtcttgtcatggctgtaccgcggtaaataaaagattcttctctgaagattcgaatcctactgatgaacttattcgttgcagtatgctgtgaatatgaatgcccgctaccttggcatccaccgattgttgtaaagtgaaagctgccggtgcctacactatgaagtaatgcactttttgcttcctatcctactcatacattctgacttt

SEQ ID NO: 300668 - DNA, 476 bp, Glycine max
  unsure (1)..(476): unsure at all n locations
tcgcggcacgcggcactcgtgcggtcgannacnctgatnaccctgtgatatccangtgatactatagatatctgaagcttggctatctatacgagcattaaaagagatgtttaaaatgtcagtacaatttgtcgacgagtatcagaatgctttaacccattataattagatcataatgaacgaggtctttcaagatttgcgtcaaacttagcactaactgattattcttggacactatatatggcatatcaatccacatcgatctatatattatgacacatatatactgagaaatatcaataatcctagatatgtggattagaacttataacttccgcaccccccgacacggccgcgcattgtatcgcatctgatgattacaatagaaacgggtgcttgtttatttgacaaaagatggctacagacatcacccccacgaagagcttctattaattgacaaaacaccaccaggaccg

SEQ ID NO: 300669 - DNA, 393 bp, Glycine max
agcttgcacaagccctgctaaggatatatcatatatgggtttcttcgttgattttttccttctctttttcttttcattttaagcatcatgatcaaattcttaaaaaatgatccgtgactacaatttcaaccgttgcttcaaggtttttttgtagtcactagctacaataacaattacagccatatatataggttctctacaatttcttgcaacatcaaggatcgtgatggaactatatctgctgtaatttaaaaccttgattatgagtttttttctgctgctgcttaatgagggtctaattttgtctctctctggatttatggtggttggttgtaggtagttaattgaggtaagttcagatccttgaggtttggtaacttgcttctaacccgg

SEQ ID NO: 300670 - DNA, 416 bp, Glycine max
  unsure (1)..(416): unsure at all n locations
tgaaaaaaaccactccgttcaggggattttcttcctgcaccagctatttttcttctagatccaacagtgagagagaaatttcaaaaacaccattccttaagacggatctgtaatggtcttatggaatgtcaatccgtttgtctatacataatttttaaaaatgtattttacaaattaatttaaaattaatagctcatgtagaattcgaacctatgactttaaggttattaacacaacactctaatgccaataagccaattatattataaaataattacattgttttatgtaacactaaaatttctaatgtatatttaatgcacatgtaagtntatataataatttttgtgataattttgatctcataattaattcttttacatatataaatttttattaaacgtataatttttatt

SEQ ID NO: 300671 - DNA, 342 bp, Glycine max
agcttgacctttgtggctattgccatgaatttgcgggtgaacaaaagatatggctagttgtatatggatctagaaattagaaaaaccatataaaataggttacgaaaggactctagtagctatcttacgattatattttgaaataggaaactaatttgactgcacagctcatgttatttcgtgtgacttcagtccgagtagaatgttaatgagctcttttggcctgttatctttctattaatattgtcggttgtttcttggtacaacaatggtcggccttacggcccggcgatttacagaggatagccgtccatgatccatgatccatgatgaagcagttat

SEQ ID NO: 300672 - DNA, 327 bp, Glycine max
tattaggttctggatatattagttcaatgctataacaacccagggagccttgcgtgatcgtttttttaatagcttgatttgaaccatgtctgagtttgtaatccggactatctaatgtacaaattagagcacctaatattaagtgacatttattaattaagcattacctccttttctttgacattaatgaggcgactactattaacctcccattaaatggttaaacaagagtgagtgaccattacacaacattgtagtatccatcaattaccctaacgcctcctccatggaaactcttacaatgtgtttttaagttactctttatgt

SEQ ID NO: 300673 - DNA, 385 bp, Glycine max
agcttgtgcattcaatatcctgatgagggtgttccatatgttctaaagactagactaatacatttgctgcccaagtttcatggtcttgcaggtgaagatcctcataagcatcttaaggagttccatattgtttgttccaccatgaagccccctgatgtccaagaagatcatatctttctaaaggcttttcctcattctctggagggagtgacaaaagattggctatactaccttgctctcaggtccattttcagctgggatgaccttaagagggtgttctggagaaattccccctgcatctaggaccactgccatcagaaaagatatttcaggcatcaggcaacttagtggagagagcttgtatgagtactgggaaagattcaag

SEQ ID NO: 300674 - DNA, 417 bp, Glycine max
tatccttacggcctgcctccggacttcaccccccgtgccaccccggaagatttaagccaagcccctacttttgaggggcaactcccaccttatgaagactatcccgggcaagacgatggggaaggagatacccatcttggccccctgctccacctcaaagatcaatccccgtatgaactaccccagccgaacatagtctgccatatcccggcctcacccacgcccgtaaaagaatctgttcccttcgcggaagataggggaaagattgaggcgccgaagagaggttgagggcgtcgagggcctcggcaattacctattctcggatttggtagatttatgtgttgtgcccaacatcgtcatccctcccaagttcaaagtaccaaactttgataagtacaaagggacgacatgtccaaa

SEQ ID NO: 300675 - DNA, 371 bp, Glycine max
agctttgagccaattcaaacaacaataactttttactcgaatgtctgattgagtcccgtaacatatcgagacgctcgaaattgaatgttgaacttttgagctaattcaaacgacaataaaatttttctcggatgtctggttgagtcccgtagcatatcgagacgctcgaaattgaatgttgaacctcttagctaattcaaacgacaataacttttttcacggatgtctgatagagtcccgtaacatatcgagacgctcgaaattgaatgttgaagcttcagccaattcaaacgacaataacttttttctcagatgtctgattgagtcccgtaacatatcgagacgctcgaaattgaatgttgaagctctga

SEQ ID NO: 300676 - DNA, 426 bp, Glycine max
  unsure (1)..(426): unsure at all n locations
taaacattcaatttcgagcgtctcgatatattacaggactcaatcaaacatccgagaaaaaagttactgtcgtttgaatctgctcagaggttaaacattcaatttcgagcgtctcgatatgttacgggactcaatcagagatccaagtaaaaagttattgtcgtttgaattgtcttagagcttcaacattcaatttcgagcgtctcgatatgttacgggactcaatgagacatccgagtaaaaagttattgtcgtttgaattggctcagagcnttaacacccaatttcgagcgtctcgtatatgacgggactnaatcagacatccgagtaaaaagttattgtcgtttgaattggctcagagcttcaacattcaatttcgagcgtctcgatatattactggactcaatcagacatccgagaaaaaag

SEQ ID NO: 300677 - DNA, 391 bp, Glycine max
tagcttgtggcacgctgggcgagcacatctctggctgatcctcttctaggatttcccaacacgctaagcgagctatgtgccttgcttagcggatgtcactcgctaagcgcatatgcctcgcttagcgagacaccagcggcaagaaccttttcttcttttggcctgaaattgaagtggtttcaacattaattcacaaaatgggagtatctactatataaaatcaaactaaacatgaaaatatgtacaattcctacaaaaagaatcataaattgggggaaagcggctaatttcatgaactattcaatacaaaagttagtcgtaaataacgactaacagtatacaaagcacactcatagtgaagtcattgaaggggatctttacataaagattg

SEQ ID NO: 300678 - DNA, 412 bp, Glycine max
  unsure (1)..(412): unsure at all n locations
ntagattcctttaaagtttttaaggttgaagttgagaaacaatgtggaaaacaaattaagatcgtgagatcagatagaggtgggagtactatggtagatacacagaagatggacaagcaccaggttcatttgcgaaatttcttcaagaacatgagattgttgcccaatacactatgcctgattctccggatcaaaatggtgtggcagaacgaagaaatcgaaccttattagacatggtgagaagcatgaggagtaatgtaaagctttctcccctttgtggattgatcgcttaagacggatgcgtatatattaaactgagttccaaccaaggctgtctcacagacaccttttgagttattcaacggttggaaaccatgtttgcgacatatacgcgtatacggatgcccgtctg

SEQ ID NO: 300679 - DNA, 391 bp, Glycine max
  unsure (1)..(391): unsure at all n locations
agcttgaatcccttctttttggcagcatcctaaaccagtaggcgttgattcactttatcgacaactatttttatatcagtggcccttgagatatgtagacaaagagggtaggcaatgcttgatctttcaagtacatttgtttatgcaatttaccaagggatgagcggtcttcttgagagagattgagatcaactggatgcactggtaagagtttggtgattagcatccacacagatgcaccttcttctaaaactcgctctttgngggttccacattttccaagagtccctttgtgtttttcaaaaaaatccctaaagatgttgctttgtgagatcttttcatccttgaacttttgaagactgtgtcatgcttctgtgggggataccttgat

SEQ ID NO: 300680 - DNA, 392 bp, Glycine max
tgcacaacatccaagaaattcaacatccaaacatcatgaactatccaaaaccaagaaaacagggcagaggcagaaaactctgcccaaaacacattccaataccacaactttccttactcaaacacccagtaacatcctcttcgtttcggttcattaactgcttgatcgattcgagaatttttaagccttgtaatcgattacacacccttggtaatcgattgccagaggtcatattccaaatattactcaagatccatagctggccagtcacccacacgcctccttgcttggggtctttggttttatatcggttgactgccaagagctcgcctatttacgcacgtcacaggttctcactgacggactatgcccggcgttgcgtcgggattgac

SEQ ID NO: 300681 - DNA, 382 bp, Glycine max
tactaactaccaagtatcagaacgtcatcaattgacatttctatatatatatatatatatatatatatatatatatatatatatatatatatatatatatataagcatgccacacctttgagagatactattcatcaaaatcagcgtgtaggtattcacgtttctcagtaagagattactgaggttggaaatttcattaagagtaggtataatttgctagacatacactctagaaagagcatttctaaaaagataaaaaacctctaaaacaacactcgcagctctcattgcatgttttttatccttttgaataattacaatagcgtgtgagcacataaaagaatatcatttatagacttgcgtctcctgccaaacatataag

SEQ ID NO: 300682 - DNA, 395 bp, Glycine max
gtgcgaaaggcttgtcgctggagctgacccatcaattgtactaactctttcagactggcgattgctaggctcttaatcttgacttgatagaacctctttttaagccaaggcgtctaactcgatcccatgttttactaaagtggaataaaaaccaatgtgagtcaagactctgaaacctatcacaggtgaaatggatgaatgcatgaagaaatgcgtatggcacagatgcattttacggatacgaaagcccgggaaattatgtgcttctacatacaacattcgcgcggatagcgcctgatgcatgcatataagaaggtgacatggaccttccatcttctcgtgacaatgtgacgtgatcaagacgcaacccgtgcgtgatgacatgatgcagatgc

SEQ ID NO: 300683 - DNA, 381 bp, Glycine max
agatttgaattacgaatcgttttcagattatgcaattcagaatgatagcagcaaattgtttggtcctattgctgtgtccatcactcattttcaactaaaaattctgtagaagtgtgcagcttatgctgttctttgctgatgtatttggttagacaaaaagcctaagcatccttttgcccgagatttgctttgtaataggaatgtcaaatgtgcgcatttaggctctcttttgtacattacttataactgtgttaagagtgtttccttgtttccacgacatctttatcctttttagtttttccccatatttctccatttttctctttctctatttaatctaatcatgcaaggaggctaataattgacatgtaatcaagtttc

SEQ ID NO: 300684 - DNA, 293 bp, Glycine max
  unsure (1)..(293): unsure at all n locations
gaactatagagaactctagcttacacattcaataatgagcgtctcgttgtagcacaggtattcgatcttacatncgagacccaagtatctcggagtggagattgcacaatcgatgcccattcattatcctgcgatttaagtttgtacacgagtacacatagggcaaaaacaggtataaagttattgatatgagcagtgacagagagaccctctcccctcttgagggcgaacagacggggcatcgagcatactctgatggctgctgacgacgtttctgacatatgtgatggtgc

SEQ ID NO: 300685 - DNA, 122 bp, Glycine max
cgtattctagcttggttctggaataatcatcaaaaaaatgcaaaattaaacaacacaggtactcgcggaagaacgttcttccgcaggaatggaaagctctcccgtggaagaacctttcttcc

SEQ ID NO: 300686 - DNA, 395 bp, Glycine max
  unsure (1)..(395): unsure at all n locations
ctaaacaccatttttctattacttcggtaacattataaagccaaagaacgcggaaattagcataaagcctctaataaaacaactctcatcatctctaagtttgacttcctacaatactctagtacatatccatattaagttgggttatattaatagttacctccagtcgtaaaaataaagtcttatgaaacatatacaaatactcggtgtataatcgatatggtcatatttcaatctatgtgaagagtgcaagaagattgtaacaccaccccaccacttgctcctctaatgtgattgatgggggaccctcccagctagctatcttagtaggatcaagctatactcgaagatataacggttacaccatacgtgaaagcctcgtacttgataaaccn

SEQ ID NO: 300687 - DNA, 337 bp, Glycine max
tagcttgtcctgtacatcaatgtatatattctcccaaatagtcttgcaacacaaaaagttgagtattttcttacatattatgtgcctatattgttgcgctcaactgggctatggaaaaaataagttgcttgatgagatatactcgtacagatggatgaaaattatatcaactattaattaaaatttaaatatatttcttatctttataatatagcatttttgtgtttctaatccatgtaaagttttttttttgtctttggcaaattatgattcctcctctacacactctccgacaagctgtaaaattattatctaatacatgtgaagaacattaaag

SEQ ID NO: 300688 - DNA, 397 bp, Glycine max
atgttgatttgggaagggagtacgaggaatggcgaataatttaagcccctcaaatgctctaacagtgacgcatcgatatacaaactcagttatcagaaattcattatgctggggccatgaatccattatccaactgactcgaatgtgatagcacccgcttctgcttagactcaggcgataacaaatgaacggtcttcaccccgaattaggttatcagtcaacacctccttgaggctgagttactccacacattttaactcccctcctaacgctgaagccttaactttactggtagcaacagagataaatttcactctcaataccatcttatgaaaaatgcactgagagctactactcacaacacccacccccacaatatcactcacctagcccctaa

SEQ ID NO: 300689 - DNA, 395 bp, Glycine max
  unsure (1)..(395): unsure at all n locations
agcttgaagaaaaaaggccagtaagtaatgtataaattaacatagtgtgaaagatgagaaaaattaatcttaaccattaattaatcaacccctatattataaatgactaccattatttggtacgaattgagacgaaaaagaattacaaatcatgtcaaatcatttatttaatctatactatcatttatgtctatttctaaattgaattatcaataaataattntattctattagtacatgtgccatttattctaaaattaaaattaataaataatttgtaacactaaatttatcatagtaaataatatacaccaattatcaaacgtgtaagtgttacctaagaagtccctttctccatccataagaataaagtaaaggcctatcggacatataaa

SEQ ID NO: 300690 - DNA, 416 bp, Glycine max
  unsure (1)..(416): unsure at all n locations
tcaagaaaaagatggcctcagcaaattccttatttccataaggaaattctatcaacagacctccaatctttaatggagagggttaccactactggaaaacccgaatgcaaatttttatcgaggcaatagatctaaatatctgggaagccatagaaatagggccttatatacccaccacagtagaaagagtttcaatagatggtagttcatcaagtgaaagcataaccatagaaaaacctagagatagatggtctgaagaggatagaaaacgagtacacacaacctaaaagccaacacataataacatctgncctaggaatggatgaatatttcagagtttcaaattgcaagagtgctaaggaaatgtgggacactcttcgattaacacatgaaggaactacagatgttaaaagatc

SEQ ID NO: 300691 - DNA, 366 bp, Glycine max
  unsure (1)..(366): unsure at all n locations
agcttgttctagtccaatgggatggcctggcacaagaggacactacatgggagccgtcggatacactactccggtcttacaaccttggcgacaaagatggtttggctgacggagggtgatgatagcaatacatatatcttggaatgggaagagcataacagctacatagaattggaccatagcaggccctgaagacattccagagtacccacacgcttcaatgactgtgtttgacgttgttaagcaagtactaatatctactttgttatgcccattatctattccactatccctgnctttacctagttattataataaaagagaatacatgcagtcttgactctgttagcactgtgagccataagc

SEQ ID NO: 300692 - DNA, 346 bp, Glycine max
  unsure (1)..(346): unsure at all n locations
taagaagatacgagtgcaaaggtaagcaaaactccagccacatattattaagatgaaaaaataatgtattntttaatagtgcacaccagttcaagaaattgtacttgaaaattcagaaattcctgttgaaacatttgcaccaaaatactgcaaataccaatttcctttacggattgcctgcggtcctcctcaagcctttgattcattgaatgactttttttcacttcatttggcaatacgagaaagactgctacttatgcatgttgatttgattanatcctctacatttcaatactggctggtacaatacatttaaccggtccttgaatttatattttataaccaa

SEQ ID NO: 300693 - DNA, 390 bp, Glycine max
  unsure (1)..(390): unsure at all n locations
agcttgcattcactaaattgttgcaagcatttggaaaatttggcaagcaattcctaaatgggaatattcaaaatcagaaagcataaggaaaatttcatctgcaatcccacaatctaggaaacaaccatataattatttaagggaaaaccttccatagacaacaattcagaaccttaaatctacacactaaataaaaaggtaaagaaaaaacaaacaaagaaaacactgaggtacatcatgcaagtctcgataatttaaagactcagctctgaattgagacgactgacactgatcgagattccatcctanaaactcattagcacactggagtgtgaccacattagaaggtgacaggtcgatctagacaccgtaacaaattntttccatcat

SEQ ID NO: 300694 - DNA, 417 bp, Glycine max
  unsure (1)..(417): unsure at all n locations
tatgtcctccatagattgcatatacagttctttnttccttaaggtttggtgggaaaggtagccgaaggagtgttgaaaaattactcaatgcatttttgtactaaatggatatacatttcttataaaatgtaggtttgttctatatgcctctccaatgaaaaggacttggtctttggttgtggacacatggtgagttcttccaaacgccattccttttttttttttttttcatattgccatacacatgataactatgaagttattcttacgcaaactgcagagactgtggatcaagttatcgaagtgtcctatatgccgtgaacagatcacaaaccatattaagctatttcctgngtgattatgggccagtttgtttaaacttatttgtttaaaaaagttcttattttaataaaataa

SEQ ID NO: 300695 - DNA, 390 bp, Glycine max
agcttgactaataatgagtatcgctcacatcatgagaaatctaatcaattggtgagggttgggtcggggacaaaacgtacgcccagtgcctgaaaaattcgcatgggcatgcgcaagctctcttagcacgacgtttgattttagatgccaaacaaacaacctgccactaaagatgacatgtcttcttcctctcattcccgcaaaacgacgccgttcattcatgggaccatcctactaatgtacatgcctttcagaattttaaattggcttaattataacatcatcagaatttattatttaagttttattttggtaaattttatcactttaaatttataattctataaattttattacttaaatttttttcacaaattttattatttaaat

SEQ ID NO: 300696 - DNA, 416 bp, Glycine max
  unsure (1)..(416): unsure at all n locations
tgtgatcaacttgccttaattctatttgttggaccgttggttttggacattaatatttgagcatgaataaaatgtaggtctcttttaagcccaatataagcttagcccacaaaaagtatgtgcaaattgggctttccatgatcttagaggtaataactctcacatatcccaatattccatgatcactgccaaaattcggaaaaaagtgcatagttaatttcagctacctttgctaaatacaaaatcaatgatatccttaggtttttggactaatcatatgaaaaccaatgacaatacttggtagaggcgaagaaggcaaagattcgcgtccagactgtaagtttgtgatgaaacctaaaaggagacaganattgngtttcgtttcaaacctaaggttttggatttaggacaaaaga

SEQ ID NO: 300697 - DNA, 383 bp, Glycine max
  unsure (1)..(383): unsure at all n locations
agcttgtcagtgtcttataagtacctaagttcagctttagcctcatttcagttcatcaattgatatcggatcttcattgtcaattaaccttcactcttctttgagtaaaatccaatatttcagcacttcgaagatgattgaactcactgaaggaggattatactacctctagcatcctagggaaatcccttagactgttcttctgtttttactaatactgtaaatacaaacaacaatgactttgcttttaacccgtgtcattataggcttggaaatcttcatctaagatcgttgataaatttgtactactttcccttaatttcatttaaataaaaaccaagtttgtgactttntctgtcttgctaaatagtcaagacaatttc

SEQ ID NO: 300698 - DNA, 427 bp, Glycine max
tttatgtgaaacgacgtgtctatcctcatcggctctcacagtctttagatttgggagccaatccaatccttgtgttcggactctcagccacttatgatagccgtcgatgatcccattactgcttcccctaagctctctgtcctttcttcacgccgcatcccatgccttgcgaactccttggagtaccctcgcgttgtggtcactgaaaccccgtgcgatgaaaggcgtgatgctttcgtctaatggcgctcctctcatggggtagccaagctgtcttatggcagaacgggattataatcatacaaccccttgttcccatcaagggaacatttggacatccttcgcatgaagatagaatcttgattcttcctttcttctagcgagggaaccaattaacagacgcccccccatgctagccaagagttgg

SEQ ID NO: 300699 - DNA, 391 bp, Glycine max
  unsure (1)..(391): unsure at all n locations
tagcttgacaaataattttcttacgtagtgtgcagtaccccaattattagcttcctgtaaagcactaataaattcttgatcactacctagaaagccttttgcaaaacatgtttccctaaatgtaagatataccaccccattgactattctaatgtcattgtaagactgtgcacctttggcagtagatagcatcattctaaggtaaaatagtctacctgctgaaggcgggacccatatgagtcttcctattgtattcccttattttcttggatgctagnacttcccgcgggcgaataaacaaatcttgagatatattgatgatatgtaagatcccgtccataagaatatatttcgttagaatgcatccacgctgtgaacatggattatttga

SEQ ID NO: 300700 - DNA, 268 bp, Glycine max
tctaacttaatattcgtattggagtatatgtatgagatgaaatctcacatcgaataaaaataaaagaagtagctatcctataatggagaataaaattgctaaatctagattttaacgctttgggttaaagtatgatgtcacattcatagagtgaatggtttaaccgccacctatagacatgtggatctttggtattgaaagactttccgattagtgagctcattcaaatctgtatgatgaagttctatggaggactattggatattca

SEQ ID NO: 300701 - DNA, 392 bp, Glycine max
agcttaactatttatggattttcccacccatccattctatagtccatttcaccattagcctccaccaacaacctccaacactaggttgaagaccttcttagcacccccaacttacgtgcctactcacatgcaacaccattcattaatgcatgtatgctatgatcattcaaataaaaatcattgtatcacactattaacatattcattcaccatcatcaatataattcatttcatcaacagctcaatccattatatattaattcaattcatcatacatatcgccattcaacatacaatttagcattcatatgttgttcaattccacatcaattcatcattcatatcattctcaccatccatgaactctcaaatagttcatctacacctcatga

SEQ ID NO: 300702 - DNA, 376 bp, Glycine max
  unsure (1)..(376): unsure at all n locations
tcttatncaaggctcatcttggtggtgaagctccttcttctatggcttattccttaatggatggcgcctcctctcacctcctttcctttgttttccgctgcatctccatggtggaaaaccaccattaaaggaccccattgaagctcaaagatccagcctccatagaagccccacaagcaagcttccatcaactactacctgcgctaagtgcacttccaatgactttaaaacaaaatgatgttggagtttagcacatcctttnttgttaaccccccttgaaagctccgttacagaatgaatctggggcttagcgtaggatggcacacttagcgcagctatcataaattttcacagagaggaagtggcgcttagcgca

SEQ ID NO: 300703 - DNA, 261 bp, Glycine max
  unsure (1)..(261): unsure at all n locations
ctctactgtcgagctgaacggatgcaatgttttatttataatgattatcagcnacatatgtgaaaatttaactatctggtgatgatgggatcacttgaaatcggaaagcataatgaaagattcatctgcatggccacgctcttatgactcattacattgacgtatgttagggaatacctctcacagaaccagactctaaagatgatatgtcttctatctactcattgcggaatacgataccattcattaatggtatgacgc

SEQ ID NO: 300704 - DNA, 383 bp, Glycine max
tagctttactcttatttatgtcctcgaaaagccgcttaaatcaccgaacaaagcatgtcctttttcaaagccaacgattttttttattgacatcactacaattaggtaatagtaataaagacttgtattctcactccacaaaattgtcacaaatttgacatatataaggcacattcctagcaaaattcaaaaaatagcgctgttttacagaaatagcactctagctaaagaaaggaattgaaacttgaatatcaggttttgattatctttttgacccccgatcgtcatctatagaaagccaaaatgtatttatgttgttattcattttccaaaatgaaaaaaatctattaatctagatgtagttattaattttccatactatg

SEQ ID NO: 300705 - DNA, 204 bp, Glycine max
ttgcaaatcgaattacacttggacccttatagacttatcaattaatatgagagctatggtgcgccgttgggtttataagattaactatattggcgatggctacgctgaatgatatcacgctggacttgtaatgatggtgtatgctataacggtaagatatgccaatattgcatgattactgccagatgtgagactaacgtgcat

SEQ ID NO: 300706 - DNA, 376 bp, Glycine max
  unsure (1)..(376): unsure at all n locations
agctttgatgatatggtcttcaccgacaaaaggatcaaagtgggtctaaaaagaggcaaatctgatcatcatgctttgatcaatgccaaaaaaaaaaaaacaagggcaaatgaagagggtgagaatgagggataagcccatgctgtgactgccattcctatacagccaagtttcccaccaacccaacaatgtcattactcagccaataacaaaccttctccttacccaccacccagatatccacaacggccattcctaaatcaaccacaaagtcgtctaccgcactccaatgacgaacaccanctttagaacaaaccaaaacaccaaccaagaaatgaattatgcagcaaaatagcctgtagaattcaccccaatt

SEQ ID NO: 300707 - DNA, 404 bp, Glycine max
  unsure (1)..(404): unsure at all n locations
tcaagaataatggacttagcacacttcttatttctataaggaaattcaatcaatagacctccaatctttaatggagagggttaccactactggaaaacccgaatgcaaatttttattgaggcaatacacttaaatatttggcaagtcataaaaatagggccttatatacccaccacagttgaaagaaccacaatatatggaagcacaacaagtggaagcacaacaatagaaaaacctacagatagatggtctgaagaggataaaagacgagccactataatttaaaagccaaaacataattacatttgacctgngaatggatgaatatttcaaggtttcaaattataagagtgctaaggaaacgtgggacactctacatgtaacacatgaaggcacaacagatg

SEQ ID NO: 300708 - DNA, 269 bp, Glycine max
  unsure (1)..(269): unsure at all n locations
agcttgtacgaatgtaanaaacatattcttcgaccttggtaatccttgactccatctcattgaatcgcatgtccacttgtaactccaaggtattaaacctttcagcaacaaaggtttgaagaccatcaaacctgtccaaaatcttttgaacaaaaaaggaatcttctccaccatgttagtgtccttcttcatcgatgggttgagcatcctttttcacccaagagccatcatgctctttacgggtaccaaaggatgcaattactgcagta

SEQ ID NO: 300709 - DNA, 319 bp, Glycine max
  unsure (1)..(319): unsure at all n locations
tgcttacgatggatgtatcttcaccgtacacatatatattatatcctgctgagagtgtatgtaattccgatagaataaatggccaatcatcattttagcttctacagtatgcaaattgttgatgatttaattcttaataaaaagaacactctgatttatattctccccgtataaacaccataaccattacatcttatctataagccaatgataagattccttcttaaacctttatcacttagtgttcaattgatttttatgaaacccatctcctaatgaccccnttatgaatattatgatgtaatgaccaatgatccca

SEQ ID NO: 300710 - DNA, 356 bp, Glycine max
tctagcttggaggtaatttcttgaaagaaacattgtaatctcagttgctctttcaatctctaactcaaaaatatcattctcttctcccaaacatgactcatgtgtgcatagattcattggatagatacacgtgtgctacagctccttgtctttgcaatttcgaaatctacttcaaggtaggggggttcttttctttctcatgtttattgcgtgacgatggagctcacacccatgttgggagtcataaataattgatttacggttttagaaaacgccccgctaagtcctcactgtataaatgatgatacaagttgcttgatatttgtgtagcgaatgtctcatgaatctcctattga

SEQ ID NO: 300711 - DNA, 105 bp, Glycine max
ggaattaatataagtatgatgccgatctttatctatgaagttgtgaagatggcgaccacattgcattcttgattatcggcgaaccaagctatgcctacaaacggt

SEQ ID NO: 300712 - DNA, 234 bp, Glycine max
gtcttagaactgaggataaatcaataactggcctgtacgctcattgctcgcgagtatgatattcactacctaaggtttgtagtacatgatagctcccaccctattacgcatcgaggcggagtatcacgagcaggaaacttgaatggtcgccattgccaatgctgaccgtattctgcgcttcactatacgtgtgcacacattattgcatattgcggctatgcgatcatgaactac

SEQ ID NO: 300713 - DNA, 318 bp, Glycine max
  unsure (1)..(318): unsure at all n locations
aagagaggtatataacttgaaatctgtgaaaattctgatcctatctggccgctcaaaaattgacaagttggaagaagatatagtgcacatggaatccttgacaactctaattgctgacaatactgatgtgaaacaagtgcccttttcaatagtaagctccaaaagccttggatatatatccctttgtggatttgaaggattatctcgtaacgttattccttctatcattcggtcttggatgtcacaacaatgaatccgttatccccattggtcattccctgcacattatnatntttagattccatggatatacataat

SEQ ID NO: 300714 - DNA, 361 bp, Glycine max
agcttttaagtgataggatgtgactcttcacctttgaatttgaatttcaacgttcaagggcactggtaatcgattaccaaaacattgtaatcgattacagccttttgaaaataattggaacgttgtaaattcagtttgaaaactttttcaaactcattttgctactagtaatcgattacaccaatatggcaattgattaccacagagtaaaaactttttggtaaaggttttgtcaaaaactcatgtgctattcaaagatttgaaaaaactttttaatcccatcttgattgatcttttcttcattgttgaatcttgagtcttgaatctagatcttgattcttgagatcttgaatcttgaatc

SEQ ID NO: 300715 - DNA, 418 bp, Glycine max
  unsure (1)..(418): unsure at all n locations
tgcttctatagagaagattcatccttggatctaaagctatcttatcatcagaagaaacattaccacaataaggaatttaacattgaaagcatcagaactatgaatatgactcgattttgctagcaataagctagttgtattaatgagtgggtaaatgatctttactcataatagctcagacaaaatcgtcaacaacaaagtccactgattggcgcttctggtaagcttgtaactcgtaatttttagttgaaattgtcaattctacacatgcaatccacatctctcaacacactcttggatgagccttncaaggattgtgttgccttatctaacttttcttncttttccagtgataaggtaaagctaaaaaattgagtctcccaatgtttgatataagttctgtaagaccatctttaat

SEQ ID NO: 300716 - DNA, 385 bp, Glycine max
agcttggtttatggtacttacccgttgaagatcgaagaacgatgaataacgaatgacgaacgtcgaagaacggttgaaacctttgcgaaattcttcacggaaaacgttatggaaacgtttctgaagcgcctcggcttagattttcttcacggaaacaatttttccaagctaattcgaaagagagagaagtgcctaaggggctgaaccattttcttcttcacttcctcccctatttatagcacaataggggagatgcttgccgcccagcttgcccaggccgccacgttgctcctccagatacaacagtcttctggaggaatcttctggagggcccaagtgggcttggttgctatttgcacccccatttctactaagtacacccccc

SEQ ID NO: 300717 - DNA, 415 bp, Glycine max
  unsure (1)..(415): unsure at all n locations
tntagccaaatggacttaccttgaattaattcctttgatagcccttttgagccttgtttccctttccttgttttgaagctcactacaagcctcaagtgaaaaaccatgatatcaccatatccttaaggaattttggagctttggaattgttttgggaataagtgtgggggggtttttgtttcattggataacttgttctgttggctatacttcatgatgtattttgggccatacttgatgtacattgtatattggttaaatgttggacatgctactgcaacgttgtttctccaggatatagagtaaaaaaaatgaaaaaaaaagcaataaagttgagtgaataagatcttaaatggcacaagaatgatgagactcttggctctactctctatgcttaaattttatcttcttttta

SEQ ID NO: 300718 - DNA, 389 bp, Glycine max
  unsure (1)..(389): unsure at all n locations
agcttacaacatatcaatttcttccttttcactaatgaattattcaatataaatggttctataggctagctaactcaaatacacacattcttgggacactaacttgtctatagttgagggtgcatgtttcctatggccatagtggcatattctaccttaggaaaatgtaaagtgcacttgttgatcattagcctaaatctcttgatgaaatctaatacaagctcatcaaccaactacttgagattcattatatctactattgcaacctttgactgttgctatacaaaagatcatggaacacttttncatatttgcttaattttaaataaaatttggtggaagggaagaataccaagtgaaattgtgttcctgttaaggataataagaac

SEQ ID NO: 300719 - DNA, 415 bp, Glycine max
tcttcttctccatcgcgctcaagaccgtgacaactctctttttcttctccatcgccaccttacctaggtacgtttcgtctaagctctattgttctattgaatacctaggtctgtttggggaactcgtggttaacccaaggacctttgtttgtttctgctacaaggattggggaactcttggtgacctgaggtacgtttcgtgtcgtggtcactggtgcttacagggtctcattttgattgaggaaagtcgtgctcactttgcagttctttgaatgctccctgtctgttgtaaaactgggtagcgtagtgtagtgtagtgtagcattgttcatttggattgaacaattctggtcttttttttatgtttttccctcctatgcattgatgtcatgtatccattgaaagaggcaatact

SEQ ID NO: 300720 - DNA, 253 bp, Glycine max
tagcttgtcgctggagctgtcccattaactgtcctaacttttttagactggtgatccctatgctcttgaccttgactagatagaacctcttttaaacgaaggcatttgacttgatctcatggtttactaaagtgaaacaaaatctcgcgcgaatcaaaactctgacatctattatgggtgcaatggatgaatgcatgaacaaatgcatataacacagatgcaatttatgaatactggagcccgggaaattgtc

SEQ ID NO: 300721 - DNA, 184 bp, Glycine max
gtttgttcgtagcggacgtacggatgactttcggatcaagttgatctgtaaaaagcttacggatcaacttgatccggaaggatgttacagatcaagttgatccgtaagatacggatttgatccgtaacatttttccggatcaagttgatccgcaagctccggatccacttgatccgttagtgta

SEQ ID NO: 300722 - DNA, 378 bp, Glycine max
tagcttatgctgcaaatattcacaatagacctgctcaacctcagcagcaaaatcaatcacagcagaacaattatgacctctccagcaacagatacaatcccggatggaggaatcaccctaatatcagatggtctagccctcaacaacaacaacagcagcctacaccttccttccaaaatgttactggctcaagcagaccatacattcctccaccaatccaacaacagcaacagccccagaaacaacaaacagttgaggctcctccgcaacctttccccaccaactttcacgcacatgattatgcaaaacatgcaggttctacaagagagcacaggctccattcagagcttaactaatcagacgggacaattggctaca

SEQ ID NO: 300723 - DNA, 409 bp, Glycine max
  unsure (1)..(409): unsure at all n locations
tccttgagaagattcctaaagaagttatagcttatcttcatacaccccctataatagctaagctcacccccatgccaaaatacatgaaaatataaaaaaagtccctatttcatagactactcaaaacgccctgaaatacaaggctaataccctatactactataatggccaaaatacaaggcccacaagaaggaaaaaccaattataacatttacaaagaagaatggatccaaccttgacccatgggctcaaaaatctaccttaaggttcccacacccctagggcctctttaatagctntagagcaagcctcttggagtcttctatccaatacccttggggggtatgatctcatcatcccctccaccctcgaaggatttgaccttaaatctgaggttcctatactctac

SEQ ID NO: 300724 - DNA, 384 bp, Glycine max
agctttgatgatatggtcttcaccaatgaaaggatcaaagtgggactaataagaggaaaatctgatcatcatgctttgataaatgccaaaacaactagggcaaacgaagagggtgagaatgagggagaagcccatgctgtgactgccattcctatatgaccaagtttcccaccaacccaacaatgtcattactcagccaataacaacccatctccttacccaccacccaattatgcacaaaggccatccctaaatcaaaccacaaaacgcatccccacacaaccaagctaaaccccacttttagcacgaaccgaagcaccaaccaaaagggaattttgcagcacaaaaccttagggtctgctcacatatctactcgataattca

SEQ ID NO: 300725 - DNA, 420 bp, Glycine max
tcaatggagctacatcggtattgtagggcacctagactagtttttgtactagaggtagttttgtaatttcacatgcattaagtgaatatttgatgtgtgtgttcgaaaataaatttaattgaattgggagaagcccaatccaattaaattttagagggggaggtgagcatttgcttgctacaccctattgccacatcatattgtcacactttgtgcatgtccttcatgctttacatgcctcatgacccctaagtacacttactggagaatctcgcacttgatcttggacagtgggctgaaccatagctaaaattctctaatcataattaatgaaaatgtggctccacatattcacacccaaattcaagtgaaatctgaatagaaattcaaatctacctcccattttgtgagacacttacg

SEQ ID NO: 300726 - DNA, 374 bp, Glycine max
agcttgttgtccgtgtacacggttccggtaatggtggcattgacggcaccggtggtcatgctcacttggctgccaccataagtggtgacattaagttgcagccttttagagtcatcaccggcttgggtctgaacggggttggtgagagtgtcgaagttggagattgagaggaaggaagaaagagtgtgaaattgtaaaagttcaaccttttgcctgtcgttgagtgagttgaggaatcctgcttttagctttgagaaggcagaatcaggtggcacaaaatggtcatcccccagaacctgacgtgaggagttgagagttgagttggttgatcaactgggtcgtcttcagaagccgaatcagaacagaaaatctct

SEQ ID NO: 300727 - DNA, 256 bp, Glycine max
tatgtttttaaaaaaaaaacctatttacttaaataggtcaaaccacacgccttaagaaaaacatattaagcttaacggtcgcctcacttagcaataatattttataataaaaatattattattaatataatatctaataaaattatttttttaaacttacaaaattattttagtagttcaacaatttgaatcattttaattaatggttaacatatgttaattcatataagcatagatgagtatcaggaatatgaac

SEQ ID NO: 300728 - DNA, 376 bp, Glycine max
agcttgtcaaagagttgatcgtgttgagataatccaattttgaccagacagaaccttttaaggataggtgtcctgaaattgcatcttttattcggtataagagttgagcaactactatgccacgtgactaaggttgtcaatacgggccggtccggctcgcttttggcccgctataaacgggccagtttagcccgtcctgctaagcaaaacagcctacctttcttagtctggcccatttcaagttggcccacgggccacccatcaattctctatttattttttcagattatgtattggattttatcgctgttggtaatatcaactttgaatctaactcttgtctttttataattttttataactaaaaataataata

SEQ ID NO: 300729 - DNA, 391 bp, Glycine max
tgagaatgatgaatcaaattatcattattttgtaattttttttgtatggcgatgaatcaaactataaattcttaaaggcacatacttcactccttttaatcaattcaggtaaaacaaggatagtttgattaattatacaaaaaaaaatacaatatgatacacagttacatatcatgatttccacgccgttggccaactattctgcttgtttattcataaaaagtataatatcgaaatgattaaggggtttcttagactacctcatacaaaaccaatacgatcttgaaacctatgattctcacaaacaatagataaacagataataatgtatatctttctccatacgaagatttctctccaatgcatcttgattctcttgaaagaggagaga

SEQ ID NO: 300730 - DNA, 388 bp, Glycine max
agcttgttacagaacttaggaaaaatcaagaacaagcttgttcgcacatcgttcgcgtgtatgatattcactcgacaaggtttgaagtagaggagaccttcaatcctataacgcaacgtggcggacaaaaatgggcagttaacttgaatggccattactgtcaatgcggaaggtattctgcgcttcactatccatgttcacacattattgcagcttgtggttacgtgagcatgaactactaccaatatatagatgttgtttacaccaatgagcacatcttaccgcatactccgccagtggtggcctcttgggaatgaagcggcaattcctccttctgatgaggcatggacactaatccctgacccaactacaattcgtgcgaaaggtc

SEQ ID NO: 300731 - DNA, 417 bp, Glycine max
  unsure (1)..(417): unsure at all n locations
tagctntattccttacaaccactaccatccaaatgggtggaaataagaaatgttgggcttacgtcctttccacaattcataagaattccttttaagattggcctaatataaattttattttgtaaataatagacaatgtttattggttcagcccataagtgtttaagggttgagtgatcactaagcatggtcctagccatttcctgaagaaatatacttttcatttacctctaaacatattctaatttggtgttcttggagtggaaaattgtggtcataccattctcttcacgaatatttcaaaatatcattttcaaattctcccccatgattacttctaattgaagagatacatgataatgactattgaattactccaaaacaaataaaactaggaaattntgcaatacaggatta

SEQ ID NO: 300732 - DNA, 381 bp, Glycine max
agcttgttacagaacttaggaaaaatcaagaacaagcttgttcgcacatcgttcgcgtgtatgatattcactcgacaaggtttgaagtagaggagaccttcaatcctataacgcaacgtggcggacaaaaatgggcagttaacttgaatggccattactgtcaatgcggaaggtattctgcgcttcactatccatgttcacacattattgcagcttgtggttacgtgagcatgaactactaccaatatatagatgttgtttacaccaatgagcacatattaacgcatactccgccagtggtggcctcttgggaatgaagcggcaattcctccttctgatgaggcatggacactaatccctgacccaactacaattcgtgcg

SEQ ID NO: 300733 - DNA, 411 bp, Glycine max
  unsure (1)..(411): unsure at all n locations
tagctttattccttacaaccactaccatccaaatgggtggaaataagaaatgttgggcttacgtcctttccacaattcataagaattccttttaagattggcctaatataaattttattttgtaaataatagacaatgtttattggttcagcccataagtgtttaagggttgagtgatcactaagcatggtcctagccatttcctgaagaaatatacttttcatttacctctaaacatattctaatttggtgttcttggagtggaaaattgtggcaataccattctcttcacaaatatttcanaatatcattttcaaattctcccccatgattacttctaattgaagagatacatgataatgactattgaattactccaaaacaaataaaactaggaaattttgcaataca

SEQ ID NO: 300734 - DNA, 204 bp, Glycine max
agcttttatataacgctcagcagcagtcaactattgatgctcttcgtgacttgggtgatgaacttccatgacttccccactgactgctggtttcttgacatacgtactccgtgcaatatcttcatactctctatgcactgattgccacgagaactgcctttacactatggaattttccgggtgaagtctggcaattcactatgc

SEQ ID NO: 300735 - DNA, 394 bp, Glycine max
tagcttgagtaaatattcagatcctgtccgaccttctttaacatctctatctttctcttccttttctatggttgtgttttttatctttcaacttatctatctcttttctattctatgccctctcctctctctggtcttcttgctggagaggcacgatggcaggagataatccacacacctcaagaaataggtggaaccatggaaatgttgtaactgttgctacaacttaacgagagagatataatctaattacatgcaagtcttttttatcttgcgccgcccaccaacgtcccatcgtggagaggaaatgatgtatgtcaatctactacttgagtgcatcatcagtccatcactacgcattttccagactaaactatgtttttttaacatataa

SEQ ID NO: 300736 - DNA, 383 bp, Glycine max
agcttctatccaaatggacttaccttgaattaattcctttgatagcccctttgagcctatgttcccttttctttgttttgaagctcattacaagccttaagtgaaaaaccatgatatcaccttacccttaaggaattttggagctttggaattgttttgggaataagttgggaataagtgtgggggggtatgtttcattggaagatataatttttggccatgcttaatgttttattttggccatgcttgatgtatctgtatattgcctagttcttctttattctgccattcatactgttcaaaaaaaaaaaaaaaagaagaagaaaagaagtgaagttgaataaatgaggtcttgttatgaggacttgatttgggagcctcga

SEQ ID NO: 300737 - DNA, 420 bp, Glycine max
tttcaacaagtgttgtccatactatttgaatacaagctcaagtttcaaggagaaaagtccaaggttgtgagttgtatcatggcccaaatggaggaggactaaatgacaccactttgtctcaattttagagtgtttaatttgtttaaataatggcccaatccttgtaaagttggatgaccaaaaatatgttttgggttaatcaactaaaagggctttagtttggtttagttcaagttgtaataaggtcccaattggcaacctaggcatcaacctttccgagaccaaatggtgctggcttgatggttgttgggggtgacttttggttgccacaatttcagttacactcagccattaagttcttttaattccctaggttagtggcattaagttcttttaattccaggttagtggatcattact

SEQ ID NO: 300738 - DNA, 388 bp, Glycine max
agctttaggatcaaacttttttttctctctttttctctcaattgttcttcattcttcttccttttttcacatttgttcttcctttttcttgcacaaattttgtggcttttccactggtgatgatcatggaaggctaaatactcaatcaatccaagtaaggctaaatcggagttatggcttagtattcataatatgtgtgaatattcatcttttcttcaatcctattttcggttttcatgattatgaatatgcttgggattgaaacaaaattaggttagcgattcctttcctatttcaaacttaataacagattgtttggatgatattccaacctaacttgtgatctcaatgaatctacggattaattcgattgaactaactcaaatga

SEQ ID NO: 300739 - DNA, 426 bp, Glycine max
taggaaaagataagttgcatattgtaagatactggacatgtcatggcgtgagatcatatccttcgtccatggaaaaagagagaataaaaaaagagtttgagttggtagccatatttcacagctggtgtaaaccttttagtaaaagacaacacaaaaatagaaagaagaaaaaaaatattaccttattactttgacacttttttactttattctcaaaacttagcaaaagctttcactcacatcacaatcctattaccatagaggtcaccctggcaatggctcactcttcaataattcatttccttgtcattgatgtttctcattaaaacgagttaacaacacaagactcgagcaacatgctactttttcttcggtaaatgtgtgacatgggcatagcataagattaatttaaagataatacccaaa

SEQ ID NO: 300740 - DNA, 374 bp, Glycine max
tagcttcaacattcaattttgagcgtctcgatatataacgagactcaatcagacatccgagtaaaaagttattgtcgttttaattggctcagaggttcaacattaaatttcgagcgtctcgctatattacgggactcaatcagacatccgagtaaaaagttattgtcaggtgaattggctcagagcttcaacattcaattttgagcgtctcgatatatgacgagactcaatcagacatccgagtaaaaagttattgtccgtcgcattggctcagaggtctaccttcaatttcagcgtctcgatatgttacgagactcaatcagacatcctagtaagaagctattgctcgttgaatttgctcagagattcaacat

SEQ ID NO: 300741 - DNA, 127 bp, Glycine max
  unsure (1)..(127): unsure at all n locations
ntgagccaacactaacgaccataactgtttactcggatatatgatggagttccgtactatatcgacacgctagaaattgaatgtagaacctgtgcgccaattccaacgaccatcacgttatacacgg

SEQ ID NO: 300742 - DNA, 381 bp, Glycine max
tagcttgtgttttctcgtgctatgcctaatatgtatatgtatgctgttttggttggttgcaggtgcggatcttgcttcggtgccagacgagcaagttttgaacgggcatcaatctgaagcggatgagtgtgagaatcaagatgaagaggctgatgcaatggttgaagaaccccattctggtatttgaattgagtgccttgaaaatcttgtgcttagagcgtgttttgtttttattttcaaaaactatttttagttttcaaaatgtaattaaataacgactctacactgttgtggagggtggtgcaaggcagagagtatagtgtggaattgatggagagcttgaagaagatgagacaacatctcctaacagttttcgttttt

SEQ ID NO: 300743 - DNA, 406 bp, Glycine max
tattaaaaatcacgtatttttataagttgcatttcatattaatgaactttttcaataatatttgtaattttaattaattttaaagattgcattagaaaaaaagtgttttagaaaaactattataccattttaattaatcatgactttggtgtaagatatttaatgattttattgactactaatttttgacgaatgatttgattgagtttttcaaccagatcttttttttttttcgattttgagatcttgattcaggattaaatttaaccctacttaaactaattcgtaataaaaataaaaaatgagtagttttttttttttgttttaattctcttgtagagaaaataaaacatgactattgaattgctttaatacagtgataagaagtgcctcaactataaatgga

SEQ ID NO: 300744 - DNA, 378 bp, Glycine max
agcttgagctcactgttgctgccccataaagctccacgaaatttgtcacggccatgctcttccttgcaagccctcttggtttcttgttcaagggctcttgcggtagctgcattttcttctcgtaacccgacacactttttccggacgtctgtagcgaccaacttgaatttttctttggcaagtcttgcttttcctagttttgtttttagagctcggacttcttcatcctcttccggagcttcgaagctttcttcgtcgataatctttagcttgagagacaatctaccctcgtgtacaaactttcagccattcatgataaccaccgatgatgccattacgaatgcccctaagttctttatctttccttaacgggctttc

SEQ ID NO: 300745 - DNA, 406 bp, Glycine max
ttctaccttgtgcttgagggctacacattgctcgatagagtgccccgtaacaccaccatgatagaggcaagttgcattgggattgttccatcggggaaaagaaggttggtagaccttcctcgggatcaccacaaccatttggttgttgagaaaagatggtagaaggtcagcataaggcatcggtatcggggtgaacttcgtaggttttctttccgagaagttcctccttgggtttgtatttgtgttggggttgggatttctagttggcgacgctgtgcaggaacggattttttggggaggcctttgtggttgagtgggcattctttgttggatgggtgccggactggaaggagatccgacattggctgagtagttgtactgggccgcgggatattggtaaatgggg

SEQ ID NO: 300746 - DNA, 257 bp, Glycine max
tcgacctgttgcttgttcatttggagaacatgcttcttggaggacaacaacgagggatagactgagagaggcgggatcacgaaattgaacgaatataagaggtatataagtggaactttgaagtatgtctcacactactgtcattcatcagagttacaacaagtgctacgaatgcttctattatagagtacgcaggcttgctgagaagctatcttgagataacttccttgagaagcgtttttgagaaaacttccttg

SEQ ID NO: 300747 - DNA, 311 bp, Glycine max
gtgttgttcatactatttgaatacccgttcttgtcttttcgacaaatgtccaacgttgtgacctgcatcatggcccaaatggaggaggactaaatgacaccactttgtctcaattttagagcgtttaatttgcttaaataatggcccaacccttgcaaagttggatgaccaaaaatatgttatgggctaatcaactcaaagggctttagtccggtttacttcaagttgtcataacgtcccaattggcaacctatgcatcaaccttttccccaccaaatggtggctgcttgatggatgttgggggtgacttt

SEQ ID NO: 300748 - DNA, 270 bp, Glycine max
agcttaatgatgtatgtcatacccctaatatttttctttttacagccagtatcatgaattgaaaatgtattttgtggaatgcaccagattgataaaagctccaccaaaatgcatagagcgtatttagaatattttttatttctatttatcacatttaggaaagaaaatacaatatgctcctcatcaaggagttacttacaacctacattattttaagatcaatctgacttgacttaacctattcagtgaagaattcatattctattaata

SEQ ID NO: 300749 - DNA, 373 bp, Glycine max
tgactttaaagaaaggagtggaagcactattagaaatataagtttctacgacacctattctacgatggttctgagtgaaccgccttagaaaatgagcctgtggcatagttcgtattattgtaatgaaaaaatgccttttacaacacacattctaagacgattattgaaaaccgcattataacgttatggctaacaacatttaaaacatgtcctaatcaaaatccatcgtaattccgctgaaaaaaaatataaccctagctagcctgttggcgctcctccgctcacctcccgctctagcactataacatgagattgatatagagtgcaatacacttggccaattgcgttttaaaaatttattatcctgattaca

SEQ ID NO: 300750 - DNA, 382 bp, Glycine max
agctttcatctagccaagattatacaaaagtgttacaagagaacttaacggtttctaattatatgggccatcaaatctatcatgtgttgacagtaattgattagcccatgaatctccttgggggctgtacacactttggcaatggctttcgctttggctaatagtcgcgggagatcttgacttccattcaaggtcaaggcgaacctatccatccacatagtcgcttcttgatgcaatgcgtcaatcaccctccctcttgcttctttttcggctacactcgtgcaaatcctccactagcttttgttcacgggtcacagactggttcaactcttccttgtatggacctatgatagttagcatgctctgctccgtgggttccaag

SEQ ID NO: 300751 - DNA, 297 bp, Glycine max
tggaaggtagtcatacctcacaaaatatatgtatgtgtgtttacgccagaaaaataccttggatatgcatgtatgtaatcgacgtagcaaaaaaatacctcacaaaatatacatatgtatgtttaagtagcaagacaccttggatatgcatgtatatagcaacaatatatatgtgtatgcttaggtagcacgacaccttggatatgcacgtatatagcaaaaatagctcacacaaatatacacatgtcgaggtagtaaaaccctcatgacctaaccccccataacacccaaaaatta

SEQ ID NO: 300752 - DNA, 380 bp, Glycine max
agcttggagaagatgcttcaatggaggaaaagaaagagggagagaaagagagaggggggagcacgaaattgaaggaataaaagaggtatagaagtggaactttgaagtatgtctcacaagactctcattcatcaaagttacaacaagtgttacacatgcttctatttatagactaggtagcttccttgagaagctttcttgagaaaacttccttgagaagcttctttgagaaaacttccttgagaagctagagcttagctacacacacccctctcataactaactcacctccttgagaagcttccttaagaagattcctaaagaagctagagcttagctacacatacctctctaatagctaagctcacctccttgagatg

SEQ ID NO: 300753 - DNA, 404 bp, Glycine max
tgagatgaggaagtgttgaagggtgaaacttcctgcttttattgttgaccacagagtggtacctggagatatgtcgcgggggtcaggagaccttggggacgtcaggtggggtgctattgcccaaaaccaagcttgaccaatcccgacccaacccgggcatagtcggtcagtgagaacctgtgatgtacctaagcaggcgagctcctggcagtcaacagataaaaggaaaacaagaccacaaagcaaggaggcttgtggtgcgtggccacctgtgaatccgtgtaatatgtggattgtggcctctggtaatcgattaccaagggtgggtaatcgattacaaggcttacaaatgaagacaggaggctaagatggtctctggtaatcgattaccacggcgtgtaatc

SEQ ID NO: 300754 - DNA, 380 bp, Glycine max
agcttggattgcatcaaggaaaggatacaagcttgaaaacttgaagaaagttagagaaaatgacaaccagatgtgtcacaccctgaggtgtgacaattcacatgggtgtaacaagcaccaaaaaacctaaattgacaaacaaaatgcaccatggctaaggtgtgtgaatttccaccaccgggaaacgcattagacgacaacatgcgtatgtataatgtttttaggatatcttaaattgtagaaatcgaaacgacacgagacaaatgtctaatttcaagaatacccgtccacaacttcgtgaagatgagttaagaatttcatgtcctaacagtgattctggtcacacaagttacgcacattgtaataccctgtttcatgtt

SEQ ID NO: 300755 - DNA, 272 bp, Glycine max
ctcaagcttggcagctgatattgcttttctgcaatcagccgtcgacatgtctttttaacccgagaccagcaactcaggcttgatggtggctgacccgcccatggaacgactatgctggagtctaactctgggccttataataagtggaaaaacgacattctctgaagaataaatgggtgcccctgaccccggcgttgaagccgatgcttccacagcattaaactgctcgtccatttcaaaggcggatgtcgtcgacgatgaattgaacttat

SEQ ID NO: 300756 - DNA, 389 bp, Glycine max
agcttgaacacttctatttacgtaaatgtagcattccttacttctcacgttatatttcagaagacctgtgccgtaagttatgcgattccacagataaaacatcaatagtcatatttttaattacagccaccctatcaatattcatgagtcatcacatgaattattgagctagctagaacaaattcctcaaaaaagaaatctgctatcatttgctttagaatcacatttgatcaccacttgataatcattccttaaaataagaatattcaacatctggttccctcgcccatcaaatatgccacactcaatctaaacacttcacgcctaaaatacataccccctcataatcccatccatatataaatgttaaccatgctatgcctatgggg

SEQ ID NO: 300757 - DNA, 419 bp, Glycine max
  unsure (1)..(419): unsure at all n locations
tggaagcctttgaacaaatgagagaatggtggagtttgatgttcgagatcccttccaaagctgtcagcctacgaattgagtagaggatcagagatcgaggttggttggatgtgctataaaatgtgccctaacataaggactgggtaaatgagtttaagagttaatttaatatgcaagtttgacaaccatgcatatgtatatcattaagaattacatattaagtaattttctagaaatttaggtaaagaagatggtgccttaatacaagacaagaacgccttttacgctcaaaacatgaatcagagcttaaaccttgacttgtgaagtgcaaaatctagttttgctctcctcgatcaacttttgagagttatattaagtatttgctagcattattaattntttaactctatatttatgag

SEQ ID NO: 300758 - DNA, 385 bp, Glycine max
agcttattatataaggtaagatttgatacccacatagttactacactacactatctttttgccagatgtaccttctagctgcttttatttttaagggagtctaataaagcctaaaacatgggactatgatatcaattatccttatcaaatgtccatttgtgtcagccacattagtaagagtttgggtgcaaacaacactgtatcctttccgccatattatcctttattcttcttcagtgctgactattgtttgggggcttaaattgtggagagcttccccgctaaaacttttaatgattttttttttccttctaaattggccacccaagataatgaggtatctgttctggccactgctttctacggataaatgatttggaacgtg

SEQ ID NO: 300759 - DNA, 424 bp, Glycine max
  unsure (1)..(424): unsure at all n locations
tgagcatacatgaaaataaataaataaatatgatagatgaaagttaagacaggttgatgaggcaggagacaacaatgtttagaaagagatatgagaaagacattgtgataggtattaattatcaatgggatctgcaaataagagaaggaaacagagagaagggtgagagcacaaatgaaatgagagcaaatgctctaccaagctagagagaggttctttgagctccaagttctattgcaaatccatcatatcaccacaacccaaaccccaattccaactaatagaatcactcctcatttctctctcctctaactaacttccactacccctccacaaaacagacacaaagcatcaggccttatgtggtttgggccttcaagaatacatcttgaagggcctatcccactntgtgactaatttccta

SEQ ID NO: 300760 - DNA, 380 bp, Glycine max
agcttgctattaaaaccaatcttgtgtatctatcaaaactcgtttgaactggagttggtttctccttttactgaggttaactagaataccatggtcgcgggtgtgaaaggaaaagtggtgctaaaaaatattcattgggattattattctataaattaataagactgtgtttggcaatgacatgacttgatttattcaatttatgatttataaatcagacaggaaaatggagcaatgaattacttatccagaatgttgaagcacctcaagtacaatgtcatgcccagatttacactaatgtttaatcttgatatttaagtgtaatgggaaaatcacccattttcactgaattatgtttagttctcatattacaatgatta

SEQ ID NO: 300761 - DNA, 424 bp, Glycine max
tacatccgtgggtgggaactgccaaatttgctgtagaacacaatcaatcatatacgcttccttacaaaacaatctctcttgcactctttctcataagtaaccacccttaaataatgttcctagttttctattacaatcaaatctctgacatatcttttcaaccttttatagaaattctaaacatcttccacatatccacgagtacaataagaaactatccataacaatatttaatgaaatttcgctcagttaccatctcttcactcttgccttctaaacgctaacggatgaatcattgaagaggaactatcagctaagttagaattagaattctctgtattctgcccattgcttttggtttcattttttacaggcttctaaaccataggtttgggcttgggaattctattaatactaccaacct

SEQ ID NO: 300762 - DNA, 389 bp, Glycine max
  unsure (1)..(389): unsure at all n locations
agcttcggaagaaagtgatgaggtacaagccctaaaggcagagcttgaaagagcctgtgtagtcgaagagaagttcaagtccatagccatcaaagtctgaaaagagtatgatgaactaagggatgtcaatatggccaccgatgaagccttggaatgagaaaccaagaaggcccgaaaggaagaacacgaccaaagcaaagttttgaggggctttatagggaagcaatagtaagctcaagctccgaaaaggtaaaaggaatcatcacgggtcaaaggccgatcttgaaggacagctaaaggcttaccttangtcgaaaagaaatttgtcccaacagttaagcgagactgaagggaatatgtgggccgtcatcgatgagtgcaaaaagaag

SEQ ID NO: 300763 - DNA, 413 bp, Glycine max
  unsure (1)..(413): unsure at all n locations
tatgctgcacacatctacaacagacctcctcaacctcttcagcaaaaacaaccacaacagaacaattatgacctctccagcaacaggtacaatcccgggtggaggaatcatcccaaccttagatggtcgaatccttcacgacagtagcaacaacaaccttattttcaaaatgttgctggcccaagcagaccatacgtncctccaccaatccagctgcaacaacagcaacagccccagaaacagcaaacagttgaggccccttcgcaaccctcactcgaagaacttccaggcaaatgactatgcaaaacatgcagtttcaacaagagaccagagcctccattcagagcttaaccaatcagatgggacaattggctacacagttacatcaacaacagtcctacaattctgacaga

SEQ ID NO: 300764 - DNA, 381 bp, Glycine max
agcttagtgttgcaataatttaatataatttactttattttacttagtatttcttaactaaactaattaatgtatcgaatcatctaatttattaatgttttatttttgtaatatgtgaagtataaataaaacataacagacaaggaagaacatttttcacgaaagaatgaaaagaaacacttatgtcatgggatgatcaacttaattaccttaaattatgttaatatttgaataacttacgaaaaatttatgaattattataattttactacctcaaatttattttgtaataaatttaatatgaatttaatttgtctttcttatcataaggttctgacatgtttgtttgacttacagggtccttcaactaaaggtgagttt

SEQ ID NO: 300765 - DNA, 287 bp, Glycine max
ttagagctcgaatatgccctataatgagtctgattacaattcgatgtgcgacagacttcgacgtagggattgataataccctggagctgcccatcttagtaggcttgaaagagatcgctgttagcacagctgacgtgatagcgaatacgctagcacggatcagacttgctatttgatgtgcaagctgtattgcgaatggctcctgaagcggaatttaatccttacgtatatgtcccgccaatcacaccgccatggtgcattctctatataacttgcactgatgctgc

SEQ ID NO: 300766 - DNA, 350 bp, Glycine max
agctttggagatccaaataagttgaagaaacgcttccatcttgtatgtatttttttcaacttcagttatgcatttctctatatagctagccatcatcagtatgtcatcaccaaacttcgtgcctcaaccccacacaccgctctttctcttgcaccccgatgccgccacctgcctccccatcctggtgctcctcctcgatcatcgtagccactcctccgtggtccagtagactgcgacgcatgacttggaggagcgccatgctgattggcttactcaaagccgcggtatgcgtttaaatgacatggaacaccgcatttgtggtggtctcagcagtgatgctcgcttgcacc

SEQ ID NO: 300767 - DNA, 391 bp, Glycine max
tgcttgtggagcttctatggaggctggatctttgagctttaatgaggtcctttaatggtgattttccaccatggagatgcagcggaagacaaagaagaagaggtaagaggtggcgccatccactacggaataagccatggaagaaggagcttcaccaccaagatgagccttggataagaagcttggagaggatgcttcaatggaggaaaagaaagagggagagaaagagagaggggggagcacgaaattgaaggaagaaaaaggccacacgctgaactttcgttgtgcctacaagactgttattgatagagtacaacaagtgtgcacatgcttctatttatagactacgagcttcttgaaagcttcttgaaaacttcttgaaagctttttg

SEQ ID NO: 300768 - DNA, 381 bp, Glycine max
  unsure (1)..(381): unsure at all n locations
agcttataagttagttgatttaatgaaagtttttggtaacatgaagcataaaaatagtactcacacaaggggtagcttaccctacgtagtagtaacagtggactaaaagtccaaatatcgaacccaaaggaccagttgtgttcccaaacaattatttcttgtaaactaagcatgtatggttaacttaaatgaaagatagatgtggtcaattgctcaatcatgtaaataagaattaacgattgagaacttgatgggaaaacagttataanaagccctctacgattggactccacactctctctaatttttaccaatactaactctaactaatccccaaataatgccaatgactaatatgcccaaattcaattattaatcttt

SEQ ID NO: 300769 - DNA, 482 bp, Glycine max
  unsure (1)..(482): unsure at all n locations
cgcgccgcgaacttggngcgcgtgggagncncttgagnaccatcggatattcacgcgatgctatagaatactgaagcttgtgcggccatggaatattctgtatgggacggagcctattatcacacatgttgcatgagttcgcgtgctatgacatggtacagatcacccttcaggagtcttgtgcttatttgcagtatttttgagctagcgtaaaacctgaagcgtatgtagcaggcttggatgatagatttcttaaccagtttaagcggcaacaatacagtatctatgaccgttgaagcaatatataccctgtaaggtggctgaattgtgtggattcacatggactaacacttcttgctactatagtcagtagatttttttataatgctggtggtacaagcaaggatatgattctacttcaatggagcaacagcagcatgaatcacatctcagccgagttgccactaatgatgctactgacn

SEQ ID NO: 300770 - DNA, 364 bp, Glycine max
agcttcccagttatggaaagctaaatcctctgttggatcttccttctaggtacttgatgtaaatatctttttatctatttaatgatgttttgtgtgttcactatgctatcagaacttcattctaccatgactttaccttgatcatgtagatgcatgtgtccttaggatcattcaacagtggaaactagtttgattcttataacttgatacgacggggctagtttgttgtattttcacgaggaatcggggtacggcaacctagttgttcctatccgtcttatgccgccatggctgagtttagtccaacaagaggaatcggcggacgatgcttgattatgattaggctacactatcatgaggaatc

SEQ ID NO: 300771 - DNA, 370 bp, Glycine max
  unsure (1)..(370): unsure at all n locations
tggcatcatgcgctgtatggaagtatggaaaaatggcatcatcgtacctttgatatacctaacaatgaggatatctcaatccgctatgagtttgatgtaaatgtcagtacacaaggctatcgtccattgatatacaggtcaatattctctctctgttcatatatcgaaaaaggcaacagagaagaatcgatttgaatttgtcattcaaataactatcgtatattgataacaatggcgatcatcacatgagagtacctttnttcccacttcaccatggacccatctttaaactacttcattgtggacgattggagacaatgctatacaaactggcaagttgtacggcattctcctaactgtagttagactt

SEQ ID NO: 300772 - DNA, 391 bp, Glycine max
  unsure (1)..(391): unsure at all n locations
agctttaagctttagtcttcattttgttcatgttgttccccctatctataacgcaatgcatactgcaacactacacacccactgcataaagggatggctaaaaccaaggcagctattatacaaccatgaccaagactaaaatataatgtcatctattaagtagtttggatcagttataacattactcatacttgcatcattcataatataagataatagcatcaatgtaatcaacaagacataacaacgtcgtatccagccaaaaggttcatcagtgcattcgcaaacttgccttgattcttggccttactttctcataaagaaacaccacgagattgttcttatacttacactntggcttatctgagattaactgtgataaagtggagtt

SEQ ID NO: 300773 - DNA, 408 bp, Glycine max
  unsure (1)..(408): unsure at all n locations
tgaagganaacttgatgccttggtcaacctagtaactcagcttgccatgaatcagaaatctacacatgttgcaagagtttgtgttttatgttcttctacagatcaccatacagatctttgtccttctttgcagcaatttggagtcaatgagcaacctgaagcttatgttgcaaacatttataatagactccctcagcagcaaaaccagcaacaacagaataattatgacctttcaagcaatacatacaatccaggttggaggaatcatccaaatcaagatggacaagtcctcacgacaacaacagtctgtcccttctttntagaatgctgctggtccaagcaagccatatgttcctcctccaatgcagcaacagcagcagcagtcacaacaaagccaacaagcaacta

SEQ ID NO: 300774 - DNA, 382 bp, Glycine max
agctttgagggtgcgcagcccaccatcttttcatagtagagtaccgataatgtgtctaccatcacgattatcgtctccctttccattattgggggtaccacctgcgccgccagatccctccaccttttgggcgtgttctttgaatgatccgtccccctttttgcacatgttctgtagttgcatcctatccggaaccatatcaaaattgtactgatactgcctaacaaaggcaaccattaggtccttccaagaatggactcgggaaggttccaagttcggcaccacgtaaacctaccccagtaagactttcttggaaggaatgtatcagcaattcctcatcttttgcgtattcccccatcttctgacaatacatctttagatg

SEQ ID NO: 300775 - DNA, 424 bp, Glycine max
  unsure (1)..(424): unsure at all n locations
tggagaggatgcttcaatgtaagaaaagaaagagagagagaaagagagaggggggagcacgaaattgaaggaggaaaatggggagagaagttgaactttgagttgtgtctcataagactctcatccatcaaagttacaacaaatgttacacatgcttctatttgtagcctaggtagcttccttgagaaacttccttgagaagctttcttgagaaactttcttgagaagcttccttcagaagctagagcttaactacacacacccctctaataactaactcacctgcttgagaagctccttgagaaactttcttaaaaagcnttcttaagaagattcctagagaagctagagcttagctacacacacctctctaataactaagctcaccttcttgagatgagaagctagagcttagctacacacc

SEQ ID NO: 300776 - DNA, 357 bp, Glycine max
agcttttcatcgtgcttgttgggtattatgactctgtgtcgctgaacagctgaaaaagcatatgaaataccaatcatcaaatttcgtcagtgaaaaaaaaaaaatcaattctgaatgagcgtgttggtgttgtggatgcgatgagtggtgaatgtaaatctcgcaaaactcactcacgtgggttttgtggaggcagagccatcttcaagggtgggttcctatcttctctgcgtttctgagtggctgtaaggtaaatgcaaaactgcaaagaagacgtctgcttcacaaaatggcaatttttcgaaatggccaccaattgcagatcacagtgtgcaaaagacaacattcccttttctt

SEQ ID NO: 300777 - DNA, 418 bp, Glycine max
tgttacagaacttaggaaaaatcaagaacaagcttgttcgcacatcgttcgcgtgtatgatatccactcgacaaggtttgaagtagaggagaccttcaatcctataacgcaacgtggcggacaaaaacgggcagttaacttgaatggccattattgtcaatgcggaaggtattctgcgcttcactatccatgttcacacattattgcagcttgtggttacgtgagcatgaactactaccaatatatagatgttgtttacaccaatgagcacatcttacagcatactccgcacagcgtggcctcttgggaatgaagcggcaattcctccttctgatgaggcatggacactaatccctgacccaactacaattcgtgcgaaaggtcggccaaaatcaacaaggataaagaatgagatgga

SEQ ID NO: 300778 - DNA, 235 bp, Glycine max
agcttccattgttcaatttcgagtgtctcgctatattatgcgcctgaatcggacctccgaatgacaatgtatgaccatctgaacttctcgagagctaccatcgatcaatttcgcgcgtctagaaatattatgcgcctgaatcggacctccgagtgaaaagatatgaccatgggaatctctcgagagcttccgatgttcaatctcgaacggctagatctatcatgcgagagtatgc

SEQ ID NO: 300779 - DNA, 407 bp, Glycine max
ttaacctcatcgtctctcacagtctttagatttgggagccaatccaatccttgtgttcggactctcagccacttatgatagccgtcgatgatcccattactgcttcccctaagctctctgtcctttcttcacgccgcatcccatgccttgcgaactccttggagtaccctcgcgttgtggtcactgaaaccccgtgcgatgaaaggcgtgatgctttcgtctaatggcgctcctctcatggggtagccaagctgtcttatggcagaacgggattataatcatacaaccccttgttcccatcaagggaacatttggacatccttcgcatgaagatagaatcttgattcttcctttcttctagcgagggaaccaattaacagacgcccccccatgctagccaagagttg

SEQ ID NO: 300780 - DNA, 388 bp, Glycine max
agcttgagaaacattggttaattgagttacttcaacattttcataagtcaacataatgaaacaaaaacctctagcatatgttcccttaataatgtaaacattaaacatcagacagagtacttgcctctagcacagtgtaatgatggatttgtatttatatagtttataataatcatatatttaagaataaccgccatttatgaatacaggacaaccaaacaaacttaaaataacaacgcatgcacgcaaacacatacatggggcatgtcctgcaaccttgattaacttgaatattggccatccatagcttattcaatggttggttagtgttacgcttcatattcacatcacaactaacaacaggaataaagtcatatccatatcacaa

SEQ ID NO: 300781 - DNA, 413 bp, Glycine max
  unsure (1)..(413): unsure at all n locations
tcatgatgaatcaagattgatttaaagagttttgatgataacaaagatgatgacaaaaagctcaaaagtcaagaacacttcatgataacaaagatgatgatctaaagaatcaaagaatgagttcaagattgaatcaagaacacttcaaggttcaaaaggaaaattgatttcaagaatcaagaatcaagtttcaagattcaagttccaagaatcaagatcaagattcaagactaaagattcaagaatcaagagaagactaaatcaagatcgtcttacaaagtttttcgaaaactgagtagcacatgaatttttctcanaaaccttntaccaaagattttttactctctggtaatcgattaccagattgttgtaatcgattaccagtagcacaatggttctatataaaagccttc

SEQ ID NO: 300782 - DNA, 385 bp, Glycine max
  unsure (1)..(385): unsure at all n locations
agctttaaaggatactacgttgtcacccagtagggcctccttaacgtgtggagccggtcgtgggatgatgatctgctgatcacaggcctagtgcctgctcgtacccgtccctgagaattggttaagtgggaaatgacattatgctgtgaaacatggctacgctaccacttacctcggttcatccctgtcttggatctggcgccgtattgaccatcgcttgaaatgatcttgtncttgtctttcgattcataaaataaaaatgcatgtgcatgtgtcccatgagcagctcccacgcaataattttttagcaaaagcctgttgggttcagttctaattaagcgctggtcgcatccccatggatcgagcaaaaaggctcggatcatta

SEQ ID NO: 300783 - DNA, 375 bp, Glycine max
  unsure (1)..(375): unsure at all n locations
agctttcatctagccaagattatacacaggtgttacaagagaacctaacggtttctaattatatgggccatcaaatctatcatgtgttgacagtaattgattagcccataaatctcctcgggggttgtacacacttcggccatggcttttgctttggctaatagtcgcgggaggtcttgacttccattcaaggtcaaggtgaacctatgcatccatatagtcgcttcttgatgcaatgcatcaatcacactacctctngcttgttttttggcctcactcgcgcaaatcctccactagcttttgttcatgggtcatagactgggtcaactcttccttgtactaccctatgatagctagcatgctttgctccgtggc

SEQ ID NO: 300784 - DNA, 244 bp, Glycine max
  unsure (1)..(244): unsure at all n locations
ntcataggtgatataaagcgcagccatttttcttatattactctcacgaggtggaggttgcgccatgttcttagaacgtgcaaaatcacaacgctcagaatcacaatgctcaaaatcatcatgctcaagatcaggatgttcaaaatcaccaataacagaatgcacatactcaccagttatggaatgctcacaatgatcatcacggatacaacgatgcctacctaatctatgaaatgtcctatct

SEQ ID NO: 300785 - DNA, 383 bp, Glycine max
agcttctacatgtctagagagttatagagagagaaaggtccaagttccagagagtttgggagattttgttgtgtgaagatctgcagagaccagagcttgaagaggaagtcgtcctgagagcttgggatgagtttgtgagtgattgtgaggtcttagaggtggaggagacatccccactacttgtatttctgcaatctttcatcattctcttctctttgttgtaaaggaagcttcccagttatggaaagctaaatcctctgttgaatcttccttcacgtacttgatgaaatatctttttatctatctaatgatgttttgtgtgttctctgtgctatcagtatttcattctagtatgcttttaccttgatcacatagatgcacgc

SEQ ID NO: 300786 - DNA, 418 bp, Glycine max
tgtgcattcaatatcctaatcaggctttttcatatgttctcaagactggactaatacatttgctgcccaagtttcatggtcttgcaggtgaagatcctcataagcatattaacgagttccatattatttgttccaccatgaagcccttgatgtgcaagaagatcatatctttctaaaggctattcctcattctttggagggagtggcaaaagactggctatactaccatgctcccaggtccattttcagctacggtgaccttaagagggtcgccttgcagaaattctcgagacaaatgaccatacagaatatgcaatttcagcaagagacaagagtctccattcagagtctgacaaatcagatggggcagatggctactcagttgaaccaagctcagtcccataattctgacaaattg

SEQ ID NO: 300787 - DNA, 548 bp, Glycine max
  unsure (1)..(548): unsure at all n locations
cacacctgtcctccatatnctctctntactatntcagctatgtgacatatgttatccgtctccatatctacanntnatcaccgcgngacattgagtctggttgacgtcctacgctcactcataggagaattcgagcgccgcagccgaggatcctctacagtctagcagcatgtctgcatgtttagaacataacgacatgcaagcatcggtaacaaatggacttcaagacagtgcatctgattatcacgcgcttcgctaaggccacactaacgtgccaatcatcagaggctaaacataggaaaaaggctatcgtgctaagggtaactctataggacctatactccttgctatgcatcggtgtggttatcatgccttaacagaccacactcctgagcacacccgattggaccaacaggacctcctggatggacgtactgacgaaagccccaatcgactccatgaccggagttataaagtatataatacctacactgaaggtatttaactcctaaatcctatggctggcctgcaaatactccgaattcacg

SEQ ID NO: 300788 - DNA, 411 bp, Glycine max
  unsure (1)..(411): unsure at all n locations
cggagagaatgactcactgttggaaaattagagatttagagagacggcggaccacaaaattgaatgagctaaagaaggagatcaggtgaactttcgaatatgcctcataagactatcattcaacaacgccaccacaagtgtttcacatgcttatatttatatcctccgtggatcccctctgataactatcttgataaactaccttgagaatgttactttagcagttaccgcgagaagacagagcttaactcaaaacgcatataacgccaccctcacttgttcacaagctgacttgataatntaacttgagaagcttacttgacaagattgctggagaagctagagcttatcactcccaccgatttaatacttaagatcacctccctgatacgataagctagaggctctccg

SEQ ID NO: 300789 - DNA, 379 bp, Glycine max
agcttgccacccagctcgcctaggcgagctaggttgcttcctcctgaagcaaccgccttatggaggaatattttggaaggcccaagtgggcctaattgctatttgcacccccatttttactaaatacacctcttgctcttttttggtgattctttttccgtaacgttatgaaactttacgaatttcgtaacgatgcttgttttctttccgtaatgttacgaaaccttacggattacgtaatcatacctttttttccttccggaacgttaccaactttacggatgcgcactaacacttccttttaatttccggcatatcacggaacttcacgaattgtgctacaatgctttcttttgacttccggcatgtcacgaaactt

SEQ ID NO: 300790 - DNA, 374 bp, Glycine max
tgttgaaattgccatgtttggatgagttaaacatacccattctgttttagggtttttgtgatgatgtttgtgatgtttatatgctgaaattgctgatggaagtctgttagagacgagggtagaactaacctaaggttagaaagtgagaatgtgatgttatgagtggaaaaagagtgagactttgagagttggaaggctaagtctgaattatgtggtaaatggaggttaaagtgagttaatactagcttgaaatgtcattccgacatgtgagaaagcgacgctgagctagagagaaaaaaaaatgaccaaagtgaacaaagagccctttctagggcaagattgggtgttgaagagtcaaattttgattcggtgag

SEQ ID NO: 300791 - DNA, 373 bp, Glycine max
agcttgcacaaaaactttctagcagtaatattaaggttatagaaatttctgtagaaagtaaaacttaaaatgggacaattacttaggcaagtcaagtaactaatatttcttaaacagtattggacactcataacgtataaaattataatgtttacctgagaagtgtcttgaacagaggaagtgcgaccccatctctcagagtcccaaaggatggagctattaaaagcaaaacttgaaatatgaattgggggagtgatagtatcagtttgctgctcatatgtccagatgccaaccaatgacttgtgatgaatcacatacaggtccttcgattctactttctctctgagtgcagctaacaaagctgtcggccatg

SEQ ID NO: 300792 - DNA, 425 bp, Glycine max
tattaggaactataaaactcagcttcacaaatagctgatagaatcaattcacagctgaacaactcaaaccaaggcctaaccgtgtttgcacccactgataatgcattctcaagcctcaaagcaggaacattaaactccataaactcacaagaccaaatgcagctgatacaattccacattctccccactctctacaccatctcacagttccaaaccgcaagtaaccccttgcacacgcaagctggaaacagtgatgatggagagtatcctttaaatgtgaccacctgacgcgaaccaagtgaatgtcgaactgaggtggttgatacaacagtgtccaatactatctacagtgatactcatctctcagtgtatcaagtggataaggtgcttctttctatgaagcttttcggcgcgacggcaccggc

SEQ ID NO: 300793 - DNA, 384 bp, Glycine max
  unsure (1)..(384): unsure at all n locations
agcttgattaccaatatcccatttttccctgtagctcatcgcgcttaagcataagcaactcttcgcttaagcactagtacctcatagagcttcaaaaaaagagttttttactttcaatggcttccaaatcaacccaaatggaatctcaaacctatcaaacatgtntatacatgtttaaagaagcctactatacaatgggtttgttagatgatgataaatagtactttgatgccattgtagagacaagtaattggggttcaaaatattatttgctaaagttgtttgcaactctagtattctccaatcagttatctaaactagaatatgtgtggaacaatatgtagcaatacttgacagacaagacaacttttgcagtttccaaat

SEQ ID NO: 300794 - DNA, 107 bp, Glycine max
cattgaacacccacaccgagaggaaccctttcaaccaaagcggaactttccaacttggcctagcggtttccgtagacaagaaacaaccctaatctgacctttccttt

SEQ ID NO: 300795 - DNA, 369 bp, Glycine max
cgcttgatttatgaagaaaattattgctgttccgaagaaatgaaagatttttttcatttaatataatattattgaaaaagaggatacagagtataaggggtatacacccttacaatctggtgattagttcttctctgcggccttttgcaagagccaaaataaatttattcataatatgactaaaaacacaagatgtgttaattaatcatcttaccgtccaagtaaattacagccatattcgtgcagcataacacaagtcaccccccaccctttcaaaagaccagaacggaaaattctatccgtacattgatttagattattctctttcaggttgtggtaatattaaaaaagtattgtgctgttatgtga

SEQ ID NO: 300796 - DNA, 452 bp, Glycine max
  unsure (1)..(452): unsure at all n locations
agagctgatgagaactgtntgaagtggtttatgactttccttacagcccttttaagcgtgaaaggagaagggaagggagggagaggtcatgggttcgaattccccacctacatctaacaaactaacattctcggataattatgttttccagaaagagttataagacaaggtaaaattaagctttttccgtaagttaaaattaacttatgcataatttaaaaccagcttttggagaacctaaagtgagcgattttctatagaagtatataagttgatttaagacttagttcattctactttcatattttcttcttctataagtgcttactgaaaaatttatcctaacactgcctacattacattgtttaccccaacgtttccccgtcctatgccactntcacgagtcacaataaactcagtataagctctnttaaatggtttcttagtgatat

SEQ ID NO: 300797 - DNA, 401 bp, Glycine max
  unsure (1)..(401): unsure at all n locations
agcttctctgaagttaaaccacacacatatatatatcaagacatgggacaaaatagttcttacaaaaatgttttccccagaacaagtacacgtaaattataacaaatgaacaaacaaaaaagcatactttcattttctcctatcaaatttatcctgagaaaacaaacaaaagtgagtcacttacagggaacaaattcttccagaactgaagatcagtcttaggaggctcaactatcttggtggcccaacagaacaacattatgagagagccacatgcaagggagagagttgaggtaagccaagggtatgggaatgcattcagcaccttcttgttataaatgttgaacaccacattcagtgcccaccatgttgcanagtatatcccaatcttcaccttctta

SEQ ID NO: 300798 - DNA, 530 bp, Glycine max
  unsure (1)..(530): unsure at all n locations
accctaactaaagctttctcttcatctgctacatacttcatattgtttcaccttaacgtctataatttctatcgcttacacagatctgcacccttctaaacaaatcactgggaagacgcgtgatagagaaacaattaagtacaagagttagaaagaatgatatatacacggngaacctagagtattcatcggtcagaagttaaaaaaaaactaatttttcaaagtattaatgcttgtttaaataattaacctcttttaatagacattttttcatacatataaattaaaaaattaaactcttaatctcatatgattatctgctaactatgcctttcagttatatatgataccacataacanacaaaaataatcataataagaaaaaaggtcttaataaccccatatataaaacccttgttgtttctagatatggttggtgttanttaaatggttcataagatatganatgagatcgaaggatagacnaagtacggtgttgaatagtagtanaagaatattgaacctgttgt

SEQ ID NO: 300799 - DNA, 401 bp, Glycine max
agctttctttcttttattggtgtattttgatctcctttcggtgctctcaattgcgggggtgtgctcaaatatatggggcaatcttgatttgctttcttgcttgattacgttgaattaggggccggcatgagatggccctacgcctataatgcattttgaaacaatacgacatgccacattgtccccgttctcttgctattgatgcctaaacgcgcgcccaccaagtgttctgtgaaatgcctcaatggcattagcctgtgacttttgtaaggagacaacccatgctgtattatgctttgcgcatattttctagtatggcttcattcccgacaaaggctagagcaattgccccacatatatcctactcctagaaactgacaatctatgcacatagagcacac

SEQ ID NO: 300800 - DNA, 465 bp, Glycine max
  unsure (1)..(465): unsure at all n locations
aattgtgattctgcattttttttcctaagtatctagattaccagtgtttctccatcgattaagattaatcttattagtaatatataactattattaattcaaaaaaaaattacacataaagaaaatcaaacttaaattgtttgttaaataaataattctcctacatataaatacaatttacaccactatatcaatcctataaactaattttgaatttgaatttgaatttacacaataaagtttgttcaattgttgtaagataatatcttattatatttttttagattagtataaaattgattaaataatatcctattatattagtcataataggacaattcttaaattgattaattagttaatctgatttagaatagctcaattgcattcggtgaaacatacttgtgatgcagaaagaacaggttcaagtttcaagtatctaagacatggntgtatataacctat

SEQ ID NO: 300801 - DNA, 410 bp, Glycine max
agctttgttttgatttcatgaagttgaacaattgactccaagcaatatataggaacttacttatggacaaacagaaatgcagcacaaagtaacaaggtgcctgtaacaagaatccatccaataaccaccaagctgcagccacgataaaaaaaaaaaaaaaaaacagaacatcttttactgatagaaacttaacgggagacaaatctatcagagtgaaggaaatgaaatgaattcaacttacgagtatacaggacccggcaaagcaagtaaagaaaatactgcaaaaattaaatcaagttcatatgatttggttaacatttagtatagagtaagaaaaagaaaaaagacaaaaccaaaatcaaacatacacaatccgagaaatgcaacaaagatcataacagcagcaacag

SEQ ID NO: 300802 - DNA, 533 bp, Glycine max
  unsure (1)..(533): unsure at all n locations
cgctccaaaacgtcttcgttcggctccgctctgttttccttcaccgagtcggacgaaggagacggagttggcggcggcggcggcggtgatggatgggacaacggtgacggcggagggtcggggttttgggattcgaataatgggaatgatagcacggacttgtattaccggacgatgattgaagcgaatccagggaaccctctgtttcttggcaactacgcgaggtacttgaaagaggtacgtgaattgaagctatttagttattacttttagattaaagcgtgtagatggatgaggtgatagagttgtttatttgatggcaggttcgaggggactatgtgaaagcggaggagtattgtgggagagcgattttggcgaatccgaatgatgggaaggtgctatcgatgtatgcagatttgatatgggagagccagaaagatgcttcgcgtgctgagacttattttgatcaagcggntannagcagctccgatgactggtaactaacatcaaactcttgggtggttctctttatg

SEQ ID NO: 300803 - DNA, 403 bp, Glycine max
  unsure (1)..(403): unsure at all n locations
ttgcttctcaaggaagttttctcaagaaagcttctcaaggaagctacctagtctataaatagaagcatgtgtaacacttgttgtaactttgatgaatgagagtcttgtgagacccaacacaaagttcaacttctctccctttttcttccttcaatttcgtgctcccccctctctctttctctccctctttcttttcctccattgaagcatccttccaagcttcttatccaaggctcatcttggtggtgaagctccttcttccatggcttattccctagtggatggcgcctcctctcacctcttctcctttgtcttccgctgcatctccatggtggaaaatcaccattaaaggaactcattgaagctcacagatccagcctccatagaagccncacaagcaagc

SEQ ID NO: 300804 - DNA, 427 bp, Glycine max
  unsure (1)..(427): unsure at all n locations
gctttcgtgtagcttaagaaaaacgtcatttcttcttctttctttcttccaaagtcatttctaaagttccaagcactttctccatcacccacagccaccattagccaccacaaaccatcattgttctccattgaaaacccacaccgagaggaacccttcaaccaaagcggaatcttccaacttggcttgcggtttcggtagagaacgaaaaccctaatctgacctttcgttttctttcaaggtaatcatggttctatgcttgtttcttgttagttccatcttgtctttgcatcttttctaactntggaaccgccattgcatgtcttatgcttcctttgaaaaaccttagagaaagagactntgtaaacgttatcctttcatgaaatgcatgttattttcgtaacctacactgaaccccggtcacatt

SEQ ID NO: 300805 - DNA, 404 bp, Glycine max
  unsure (1)..(404): unsure at all n locations
tgctttcattaagtggtaatcagagcacaagagcttcaagtaggtgctccttaaacctccattaattttttttctttgccttctcttccattgttgtttcttaatttttctccatgtatctcctcacatgtcttgttctaaatgttgttaacatgattctttagagtttccaccgattaaacttgctatagaagttagatttgattttctatggttcaaatttcttgttcttgttcttgaaccatgaattgtgttgagtttacgttcctttgagttttgtcttgttattttttgtggctgaaacctaaaccataaaattcttacaaaaatattaaagtagaagacaacctcataaatctagagtgacttgttcacctattgtagttntgtcatagaagtcatgt

SEQ ID NO: 300806 - DNA, 421 bp, Glycine max
  unsure (1)..(421): unsure at all n locations
ttccgccccggagtacgacagtcaccgctttaggagcgttgtacaccagcagcgtttcgaagccatcaagggatggtcgtttctccgggagcgacgcgtccagctcagggacgacgagtatactgatttccaggaggaaatagggcgccggcggtgggcaccactggttactcccatggccaagtttgatccaaaaatagtccttgagttttacgccaatgcttggccaacagaggaaggcgtgcgtgacatgagatcctgngttaggggtcagtggatcccgttcgatgccgacgctatcagccagctcctgggatatccgatggtattggaagagggccaggaatgcgagtatggccagaggaggaaccggtctgatgggttcgatgaggaggccatcgcccagctgttatgtataccg

SEQ ID NO: 300807 - DNA, 390 bp, Glycine max
  unsure (1)..(390): unsure at all n locations
tgcttgtagaatggctagacatgatacatgtcagggttttggtttggttcaaggataaaagggatgccccacattatttccatgacacaaatgcaaaaatgatgatttggaaactttatgcaaaactggtcatgcatgcacctatgcggacactcaactggtcatgcatgcacctatgcggacactcaagtgtcaaatttttatggtcatgtgacgctagggctcaggattcatttcctctatttttagtcaacccaacgtttccaaaatatgttcttttatcaatttgtgcattcatccgagtccattttgggtactcgggaaaattttcacagcattcacccttcaggtgtatacacattntttcaaaaactagttatgatcagtgaa

SEQ ID NO: 300808 - DNA, 470 bp, Glycine max
tctgagaagaggcaaatttgattatgttgctttggtgaataggaagccttgggcaaatggagagaataagaaggagggagaaacccatgttgtgagtgtcgttcctacatggccaaattttccactagctcaaaaatatcaatactcagctaatatcagtccttctcattacccaccgccctaccagccaagaacacccaatcatccacaaaggccacccctaaatcagccacaaaacccacctgctacacatccgaggccaaacaccacccttaatatgaaccaaaacaccaaccagggacggaattttctagaaaagaagcctacaaaattcaccccaattctggtgtcgtatgctaacttactcccatatctactcaataatgcaatggtagccataatcccaacaaagatttctcaacctccatttttctgaggatacaactcgaatgcaacatgtgcttatcatg

SEQ ID NO: 300809 - DNA, 401 bp, Glycine max
ttgctttggattaaagtgatgacgtacaagccgtaaaggcaaagcttgagagagcccgggtagtcgaagagaagttcaagtccatagccatcaaagtttgaaaagagtatgatgaactaagggatgtcaatatggccaccgatgaagccttggaatgagaaaccaagaaggcccgaaaggaagaacacgaccaaagccaagttttgaggggctttatagggcagcaatagtgagctcaagctccgaagaggtgaaaggaatcatcacgggtcaaaggcatgatcttgaaggacgagctaaaggcttgccttatgtcgaaaagaaatttgtcccaacagttaagcgagactgaagggaatatgtgggccgtcatcgatgagtgcacagagaagctaaatcta

SEQ ID NO: 300810 - DNA, 463 bp, Glycine max
  unsure (1)..(463): unsure at all n locations
caatgagctggtgaagaagaatgtggcatttacctgcgtgaaaaacaagagcaagcgttagttttgctcaaagaaaagcttactaaggcacctgttctagctcttcctgacttttctaaaacttttgagctagaatgtgatgcctctagagtgggagttggagctgtattgttacaaggtgggcaccctattgcttattttagtgaaaaacttcatagtgccaccctcaactaccccacctatgataaagatctttatgccttaataagagccctccaaacttgggaacattaccttgtttccaaggaatttgtcattcatagtgatcatcaatcacttaagtacattagagggcanagcaagttaaacaagaggcatgcaaaatgggtagagtacctacaccaatctccataggttatcacatacaaaaagggacaacaaatgtggtagctgatgcgtctct

SEQ ID NO: 300811 - DNA, 395 bp, Glycine max
  unsure (1)..(395): unsure at all n locations
ttgctgcacgcccaccagtcatcacttctcttgctaagtttttttttttaacatatatctggcgagaattcagaatttagctgaaattatttgagcacaagtttttgtggcagatcaaaaaaatattctggtcaaactttgggcttattgggttcacatacacattattattgggcaaaaatttaagagatacctattggactaaatatccgttattgttcaaggtaaattgagcgacctaagaataaagtaggaaaagtagagcgccacaatttgctgttgctttcatttagccaacacaaattgttttgattnttttaatatttaattataacattntaaataattccctcagaacatatcaataatttggaattttcaacagaatatagatt

SEQ ID NO: 300812 - DNA, 500 bp, Glycine max
gacattcatggtgctccgaacaaaggtggagtatggaggattgccttgagggtccgcacttaggcaatcatgaaactcagctccaaactcaaaagtggaggacacatgaacaaccctaagcaataacattcatgtgtctccggaaaaggacgagaatggaggattgccttgagggtcctctcttaagcaatcatggaatacagctccaaactcgaaaatggaggacacgtgaatgacaatgcaattcactcacgtggctccagaaaaggatgagaatggaggattgccttgagggtcctctcttaagcaatcatggaacacaactccagactcaaaagtggagaacacatgaacagccctaagcaataacattcatgtggctccagaaaaggatgagaatggaggattgccttgagggtcctctcttaagcaatcatggaacacagctccagactcaaaagtggagaacacatgaacagccctaagcaataacattcatg

SEQ ID NO: 300813 - DNA, 400 bp, Glycine max
tttgcttgcttatttagtagacccttgaagataaaaccattacattttggttcagaacagcatgtgcaaaaatgtaactgatgaataaaacagagaatgtatgccaatgatataagcaatagtttaaatggtatttaatctgatgtgaaagccatacaaacaaaccttaacagcaccatcatagtctgtggaggcaagatagttctggatgtagttattccaacaaacacaactgagccttgatctgtttgacatctcaactacaggataatggatgtcaatggaatcattgaaaagtgcattgaactcaaatattttaattttctttgatatcccagcagcagcaaagtaatcttcatccctatcaaaactcagagagcatattacatttgcaggatta

SEQ ID NO: 300814 - DNA, 526 bp, Glycine max
  unsure (1)..(526): unsure at all n locations
ggcactatcacgacctgaaagaaagacccttcttcgatgggctgtgtgattntctaagctctggccctgttattgcaatggttagaaaatataaatgactcaaccactgacttaagaatccaacaagccagtgtccctaatctgtctttttttcttgtttccaaaaattgatatcatacgtgtgggaaggacaaggagttatttcctatggccgaaagctaattggagccacagatccacagaaatcagaacctgcaaccattangggtgatcttgctgttgctgttggaaggtaactaatagcatgtttggttacaagatgtggtttttacgtgtactgagatgtttatagttataattntcacatccaaaatgtaatttcttacttcttaacnntgttcaaacatcngtataattgttaaccanagaaaagtgctagtttcgtttctctttacataatgaattgtccatttattggtgatcacaatttgataattgttgtcatgcatgcagaaacatcatccat

SEQ ID NO: 300815 - DNA, 383 bp, Glycine max
  unsure (1)..(383): unsure at all n locations
tagcttttggctgctcaattgctccaggttgctgcatggaagggcaaaggtctgtatggtggtcagcagaggagcacaaaccacagacccttgcgacaggtacagatttctagttcaaggccagctgggttaccaagttaactaatgcatctagtttgccttcaagcttcttagtttcagatgatgcagctgagtttgtagctacctcatgcactcctctaatgattataacatcatttctggcgctaaactgctgggagttggaagccatcttctcaattaaatgtctagcttcaatacgagtcatgtctccaagggcttcaccactggcagcatctatcatacttctcttcatattactgagtccttcataanaatattgg

SEQ ID NO: 300816 - DNA, 553 bp, Glycine max
  unsure (1)..(553): unsure at all n locations
gatttctttaggttatttcatataaacctcctcctctaaatcaccattaagaaagcatgttttcacatccatttgttgcaactcaaggtcaaaataagcaactaatgccaagataatacgaagagaatctttcttagatacaggagaaaaagtcattgtgtaatcgattccttctttttgagtaaatcctttagcaacgagtcttgccttgtatctctcaatgttgcctaatgaattgtttttggtcttaaagacccatttacaaccaatggcctttgccctattaggcaactctacaaggttccaaactccattgctctgcatggaattcatctcatccttcatggaatcataccataaatttgactctttacaactcatggcttaatcaaaatttttgagatcattntcaactccagtattatagtcaaattcttacaaatatacaatantataactaggaacnaactaatntcttactctagtagatctgcttaatggtgtcatcacattntcttgtggatcatgttgttagcnagggtgtgatcatttc

SEQ ID NO: 300817 - DNA, 408 bp, Glycine max
  unsure (1)..(408): unsure at all n locations
agctttcatcaagtggtaatcagagcacaagagcttcaagtaggtgctccttaaacctccattaattnttttgctttaccttctcttccattgttgtttcttcatttttctccatgtatctcctcacatgtctagtgctaaatgttgttaacatgattctttagaatttccaccaattaaaatagctatagaagctagatttaattttctatggttcaaatttcttgttcatgttcttgaaccatgagttgtgttgagtttaagttcctttgagttttgtcttgctatttttttgtggctgaaacctanaacataaaattcttacaaaaatattaaagtagaagaaaacctcacaaatctagagtgacttgttcacctgttgtagttctgtcatagaagtcatgtcta

SEQ ID NO: 300818 - DNA, 375 bp, Glycine max
atttttctgagacgtgatgcaatccctcaagttattgttactgatagagattcaacattgatgaatgcaatgaaaactattttccccaagtcaaccaacttgttgtgttggtttcacattgataagaatgtgaaggcaaaatataaaacctttgtgggtaaaaaaaatgcatgggattatgtcatggaagcatggaggagtctcgtggattgccttctgagcaagggttcgatgagttaagaagtttgaaattgcttgctcaccatggtcaatatttgttgactatgtcaaacaaacaaagttgattccctataaacaaagatttgtaaagcttggacgaataaggtgatgcatctatgaaacacaacaactaac

SEQ ID NO: 300819 - DNA, 409 bp, Glycine max
agctttctgtgttttctagtttccaaaccttgttctttcacagaaaacaaaagtgtgctatatcttttcattctcttctcccttttccaaaagaacgaaggactaatcgcctgaattcttttgtgtctctcttctccctttgccaaaaataattcgacaaggactaaccgcctgaattctttttgtgtctctcttctcccttttccaaaagaacaaaggactaaccgcctgaattcttttgtgtctctcttctcccttttcaaagaattcgaaacaacacagtctgagaattcttttgattcttccctttcccttacacaaaatatttcaatggactaactgcctgagatatcttttatttccccttcacaaagtttcaaaggactaaccgcctgagaactttgtctta

SEQ ID NO: 300820 - DNA, 465 bp, Glycine max
  unsure (1)..(465): unsure at all n locations
ctctaagggctaccgtgtctacaacttgcaaactaagaaactcgtcattagtcgagatgttgaagttgatgagtacgcttcttggaattgggatgaagaaaaagtggagaagaacgttcttatacccgctcaactacctcaagaaaaagctgaggaagaagacccaggtgaaccaccttcacctccaccacaacaacaagatcaagaactatcatcaccagagtctactccaagacgagtaagatctttggtggacatatatgaaacctgtaacttggccatacttaaacctggaagctntgaagaagcgttaaagcaggaagtatgggtcaaggcaatggaagaagagatacagatgatcgagaaaaacaacacatgggagttagtaaatcgtccccatcaaaaagatatcattgggggtaagtgggtctataagacanagctcaaccctgatggcaccataca

SEQ ID NO: 300821 - DNA, 397 bp, Glycine max
agctttctttagatgctagagggggctaagctcacacccctccaatagctaagctcacacccatgccaaaatacatgaaaataatgggaagcttccttgagaatcaaggaacgtagccttcttgggaagcaaggaataatgcttccttgaaaagctagaggggagctactcacaccccttcaatatgaaaatacaaaaaaagtccctactacaaagactactcaaaatgccttgaaatacaaggctaaaaccctactactagagtactcttaacttgtacccttaatttgtagggtaccctataaacctaaaattgccaaaatataaggcccacaagaaggaaaacctattctaatattcacaaagaacagtggacccaaccttcgtccatgggctc

SEQ ID NO: 300822 - DNA, 479 bp, Glycine max
  unsure (1)..(479): unsure at all n locations
cctgagagcatgagatgagtctgtgagtgattgtgaggttctagaggtggaggagacatccccactacttgtatttcttcaatccttcatttttctcttctctttgttgtaaaggaagcttcccaaatatagagagctaaatcctctgttggttcttccttgtaggtacttgatgtaaatacttgtatatctatttaatgatgttttatgtgttctttgtgctatcagtacgccatttcattgtgcttttgccttgatcatgtagatgcatgctttgttaggatcattcaacagtggaaaatggtctaattcttagaacttgataagacagagctagtttatcgtattatcacgagggatcgaggtacggcaaccttggtgttgtatgtttgcttaatggggtctgtcgtgttagtcaaatgagaattgagatatgcttgatctgatangtagatatacgagaatggattacattcaga

SEQ ID NO: 300823 - DNA, 402 bp, Glycine max
agctttatttactatattctctttctttacataagaatctagcaaagtaaaatgaaatatgaatttatcgaagacctcaacacagatcgtgatgattggtttctaaaagtgtgtattgtttgattgtggaatgtttatacaaaacaagtgagcaacataatatgatttcaaaattcaataatattttacaaggagagaacatatacactatacataatttaaaaattgtctcagcaaatgatgcatacaaacttgtcaaaggaccattcaaaggattatttttacttactattgttgtcaagacaatcaataacatatccattagcattcctctacactattctgagtttggttcaatggaaactctagctcacagggtggatgatagagttgtcttaacat

SEQ ID NO: 300824 - DNA, 493 bp, Glycine max
  unsure (1)..(493): unsure at all n locations
gtccggcgatggttcaaaacgattctccacatccacaaatcacgtataacccaccatcccctgtttcccacctccaactgagctcacgtactcccacgtagcccttatcattgttcctctcaacgccgggtccccatcaatcctcccaagcttccacaacatccaagtaatttaacattcaatcatcacaaactaacacagccaagaaaacagggcaaaggcagaaaactctgccgaaaacacaaaccaacatcacagctttgcacattcaattaccccagtaacattctcttcgttccagtttgttaaccgttggatcgactcanaaattntactggaagtctctagtacataagtctacattntgaccgttgggatctgctagaaaatgtccagaaccctatatgtactaccatnttcacaaccagccatacacanaacattttctgcacttataataaattctggtgcacattccaacagcaaaaacaac

SEQ ID NO: 300825 - DNA, 410 bp, Glycine max
  unsure (1)..(410): unsure at all n locations
agcttatatatttctaanatgatctagtattctatatagtaccatatatgtatcaaacttattgcttttgaagcatgcctaactgtccacaatgcccaacacgagcacaagtgcagctcacacacatacacacacaaacatattctttgataagtatagnttatattgcttttaatttatgatacttatttgaattatatcttattatttttgtaaggctactggggtacgctcaatagcttttcatcctgatggaagggccctatttactggacatgaagatggtttgaaggtaaaaaaagttacaatgttagattatataaattattaatgcagcatctagaactgatttaagatgtcatttctatgttctgatatgctgtaggtgtattcatgggaacctgttatat

SEQ ID NO: 300826 - DNA, 540 bp, Glycine max
  unsure (1)..(540): unsure at all n locations
acacaaataactcttttgaggaaatttgtactgaaatgtggatcttcatgatatgattctacctactagttatatatcagagcataaatgaggaaattctgacatgctaggatgtaatcgatggatgaactgcttttgtataggatggttcaatggaaacatgcttacaatgaccttggaacactaatgcaaaatgatggcatcaacctactttaggtataatttgtttgttccctttcttggtctcattttaaaaccatggatcacattcgaatgacccagcaaaacaatattgtccgacacttatcagttgaattttcctaccataattataagttctcatatatatacacccacgcatgatgtcaacattcatgttaattattgcaatattttaaatcctttaccaaggaatcanttttctctacttaatatacccattntaaaaagaatgcgccataaggaagtccattaacttcatcttttttacccttacacttttctttcgctcttatcaatggtcgttctacccgaaatatg

SEQ ID NO: 300827 - DNA, 407 bp, Glycine max
  unsure (1)..(407): unsure at all n locations
ttgctttaacgaaaatgcaacacacagccgaaaacattgacatggatcaaagttaacatatgaagatgacgattcagatgtaagtcagatgtagctcagcaggcagcacccttcaaataattttctgaaaagatactcaatattgtcactatatatgtcaggtatgctttgccaaaatttattgtcattttactaaaatcctttctgacctaacatgaaagtgttaaaaggtgtaaattttttttctgacctaacacaatacaaactgcgtgaaaacgatgtaatagatagtctctaatcctctcagtctctcattaggcagatggtgtgtttagtactgagtaggaggggcagaaccattntttttaagacaaacaagtatgtaataaaaatgttatacatataat

SEQ ID NO: 300828 - DNA, 501 bp, Glycine max
cagacccttattccatttttttaaccaagccacaactaagtctctcgttacccattatctttggctttggttgttacttcttcctcacttcctctctgcacattttttgtttctaatccttctatttaggtatgtttttatggcatttaaatacttagtatttcttttattatttgattagtatgactgaacatgatgattatatttatttgctattggttgtttacggttatgagttttaaactcaattattttgatgatatatgactagtggtatgtacttttatttggttattatgaatgactttctggattatatgacattctatgaagtattatatttttagtgtgatgaatggctatgatatcttgtttgattggtttctattctcatgtattctggctatattattatgcgatttgaacaatctaactatttcttatttgcatggtatggttgaacaagtatgctatttcgctatgtggatttatagctaatct

SEQ ID NO: 300829 - DNA, 396 bp, Glycine max
tgcttgggattttccttctgattctgtttatacatttatgactttatggcataagatgaaattcaaagattggatctcttgttagttgttattaatgaatagcttaaacacttgtgcttgagtgaaacagtagtcgtgagactgtggtttaagctgctttccttaatatctgtcttatgattaacttcatctaatggtacaacttacattttattcttctctatgcatagctgcatattttgtgaaaaacaagtgatgagtagatattgcttcatttttcttatcatgcaatcaataatttttgctgcatacacctttgtacatgatcactgcatgttattgtcacttgaggacaagtgagttgttctctttttgcttgaggacaagcaaaactgt

SEQ ID NO: 300830 - DNA, 449 bp, Glycine max
  unsure (1)..(449): unsure at all n locations
tggcccatcccaaaaagtgtgggagatattaggagcttccatgggttagcaagcttctatagaaggtttgttcctaatttctctacaattgcctcacctctcaatgagctggtaaagaagcatgtggcatttacctgnggtgaaaaacaagagcaatcctttgctttgctcaaagaaaagctaactaaggcacctgttctagctcttcctgacttttctaaaactttttagctagaatgtgatgcctccagagtgggagttggagctgttttgttacaaggtgggcactctattgcttattttagtgaaaaacttcatggtgccacccttaactacccctcctatgataaagagttntatgccttaataagagcactctgaacttgggaacattaccttgtatcctangagattttcattcatagtgatcatcaatcacttaagttcat

SEQ ID NO: 300831 - DNA, 400 bp, Glycine max
ttgcttctcccccattttcttataaatagggggagaagtgaagaggaatttcgttcagccctcctggtaattcagaatcacttaaaattagtgaaaaaaattggttccgtgaagaaaatccaagccgaggcgcttccgtaacgtttccgtgggtgatttcgcgaaggttttcggccgttcttcgacgttcttcattcgttcttcgtcgttcttcggtcttcaaccggtaagttccctaaatcgaacttttcaattcattctatgtacccttagtggtcctcatttgcttttacgtgctttcatttacatttcctttacttttcgtacccccttttgacgtgctctagtcatttgcttaagttattctctcgcctaatcaaaaaatacaataaatttccac

SEQ ID NO: 300832 - DNA, 472 bp, Glycine max
  unsure (1)..(472): unsure at all n locations
tgctctattttcatctcccactccaagtaggcctccggatcattctttcctttaaatggaggaatgttgagtttaataccatcaattcggttttgtctaggaacaccatcattccctcttctcctcctttcttcttcattatgatctctattctccatttgatccaacctctcatggagcgcatcatctcgttgtttcattaacctctccaaatgttgcatcaaagcttgcatttggaattgcgaaagccccactccatcattaggattagtacctgacatctcaaacaaacaaatcaaacgtaacaagacaattatagttgctgtttgaatacctcacccactcaagtgtatcacacaattatggctnttctctaatgaaacactcttgccttttaccactctaattccccttgagttcttaagcaattcaagagattatggccacaacanagaacaattcaccaatatgt

SEQ ID NO: 300833 - DNA, 401 bp, Glycine max
agctttgatggtgttgagaagaaatcacatgtttttcatcatcaaaaagggggagaatgtgaatgtatgtatacatgattttgatgatgtcaaaagaagaatcaaacaaggctcattttgcttcaagattaatacaagattgtttcaacaaacaaagccttgattcaagatttcttcaagatcaagccttgcctcacaatgaaaggtttcaagtcattaaaggcacatgtaatcgattaccaatacatgtaatcgattaccaatggtttgaaagtgtgtaatcgattacacatcgtatgtaatcgattaccagagactctgaacgttgggaattcaaattttaaatgaagggtcacaactgtttaagacaaacaactgtgtaatcgattacactaattctg

SEQ ID NO: 300834 - DNA, 512 bp, Glycine max
  unsure (1)..(512): unsure at all n locations
cgggcccataatctttagcaattcttgctcttttacctctttgaggctctatatctggttctgattgtgcaagattttcactactaatagcaggaagataactgtggcgtccctaaattaatgactggtttgatagtaatgatttaaataacaaaaaccatggtaaatttttttttctttttctttttcatttctttctctttccaccataactaggtttagaaggaaaatcctcactatagagtcctgaatggccggttcacaactctattcggagtcatttctttcttaccgttcataatctctaaactattttgctgtttcaaaaggaagaatgtaccagccattactttaggtcgtcacgtgaaaataaaagaataaaatacggtcgataaactcttttacaaataaatttgctaatgctttcttttcacataacaagattgatcataaatgcattcgtcatttacagctgtccaaaatatgggagtttacanaatacatagtgtcat

SEQ ID NO: 300835 - DNA, 404 bp, Glycine max
ttgttttaaaatagacaatgccacaaaacacaaattagaggcagagtaccttccgcaaccacttcttaatccgagtgtgatgtgcagagtcctcatttggcttccttttgttattcttgatgtcacatatgattccaagcatgaactccatctacaagttaccaaggaatcagtgctgacctgtgcgtagaaaaaatagtttttttcccccttttattataaaacaaagcattctcactcttttactatttttcttttcattgtcatcttcacaggaagccttcaacttatttgatgtattctgaacactaagaatgaaatctttcatggcagctggatcatcagcccttaatttcatcccacaacctattcagacacataagataaaaataagtcagagatgg

SEQ ID NO: 300836 - DNA, 436 bp, Glycine max
gaaaacactgacatttattgtgaaagcatggaaagaagaattggtggcagtggcagaggtatagaaatcggatcattactattagcgtattgataaagaaatctttgaacaaatactccatatgggaatctaacaaataaaaaaaaaaaacagaaaaagaggagggtgaatgttaccttgaagcaaccactttatcaaaggcactaatgtcagcaaacacttctattataataatcacacaaatacacaataggccagccaacagaaaacatatttatagggaagtgttaatgttgttgcgtgttttattggtaaactatatatatacgaaagataacaaaattattcggatccagacccagtttttaggacctccaacgggaacttaaataggcacatatggttatgcaaaaatactaaataattaataattatc

SEQ ID NO: 300837 - DNA, 400 bp, Glycine max
  unsure (1)..(400): unsure at all n locations
tagcttgaagtgaggaagtgtggaagggtgagacttcctacttttattcgttgaccacagagtggtacctagagatatgtcgcaggggtcaggagaccttgnggacgtcaggtggggtgctattgcccaaaaccaagcttgaccaatcccgacccaacccaggcatagtcagtcagtgagaacctgtgatgtacctaaacaggcgagctcctggcagtcaaccgataaaagaacaaagaccacaaagcaaggaggcttatgtggtggctggccagctgtgaatcttgagtgatatatgggatatggcctctggtaatcgattaccaagggtgggtaatcaattacaaggcttacaagtgaaggcaggaagctaagatggcctctggtaatcgattaccaa

SEQ ID NO: 300838 - DNA, 466 bp, Glycine max
  unsure (1)..(466): unsure at all n locations
agactggaaagcggtttctaatgactcctctgcggcttccacataaggcatagaggatgggcagctcaccaagatgtcttcctcgcttgatacgatgaccagatgcccttccactacgaatttcaacttttggtggagtgttgagggaacaacccccactgagtggatccacgggcgccccaatagacagctgtagggggggttaatatccattatttggaaggtgacttgacaggtgtgagggcctatctgtactgggagatcgatctctcccctaacctctcggcgggtgccgtcgaaggcacgaaccaccattgaacttggctttaagtgggaggcattgaatggtaatttctccaaagtgatcttaggcatcacgtttaaactggaaccattatcgatgagcactttggctacgatatggtccatacacttgactgatacgtgcanagccttattatgccct

SEQ ID NO: 300839 - DNA, 391 bp, Glycine max
  unsure (1)..(391): unsure at all n locations
tagcttatcagacatcattgtttgtgacgcctatcttatttttctttctgcattttttgtgtccttgttaatttccgcaatgttaattctataattctatccgaatttcttatttgcatatctctagttttacttaacctttttcggtgtttttgtacctaaattgtattttagaatgtcctctttgatctcaatttggaatcgtcctaattcaagttatgtaggctgagaaacaaataaaagttaagatacgtttccagttcaattggtgtgcgaatctcatcttaaaanttatccaaattgaanaaggcaaggcggttcacatcaatttgatatatatcttcttatagctntttattcccttattatatcgaacattatattctctttc

SEQ ID NO: 300840 - DNA, 448 bp, Glycine max
  unsure (1)..(448): unsure at all n locations
ataagttatagtagtgattcttacttgatgaaatgtgagaaacacttctaggtgtgaatcccgtacattgtgccaaacattgttaatgaattgtgtacttggtcatatgcttcgcggttacatgggagttggtgtgggatcaattctttcaacgtgttgggtcttatagatctacctacagtcggacatagaagtattgaagtcctctggatgaggttaagaacaattgtcccaaactactaactcaatatcgtcacttatctgagccatataatggcttagaagaatgacaagtgcctttntgttatatttggtctttagctaattcaatgttcttgaattgtgcactttcattaatatagaatatccatttttgtggacntaatcatgacacccactacgcattaaatntgcaacatatttgatgattccttcacttgtatatact

SEQ ID NO: 300841 - DNA, 379 bp, Glycine max
  unsure (1)..(379): unsure at all n locations
agcttggttccttttattgtggatgtgtaagtgcaaataataacaattgtcccacttgagtagcatgccactgagtacaggttgattcttaagtctatctttatcatttgctattcactaaccacctttcactgtaactataattattcttatgatgagttgattgatacataaactgaatgcatacttcttgngttgagatatgagtactatatctcttttcctaaaacactaggagtggtatgatgagtgattagatggtctttatggaactgaacatgtcggacgacattgcacgcctaatggaaatctatgagatgcatcttgagaatgtggttgcttcttcctatcaactctacatctatgtgtctataataat

SEQ ID NO: 300842 - DNA, 291 bp, Glycine max
taccatcaatgagggcttgtctacgaacaccagcagtccctctggtcctccatttttcatcattatgatctatgttctccatgtgatacaacctgtcatggagcgcatcatcttgtggctgcattagcctctccatatgatgcatcacagcttgaattaggaattgcgacagctccactccatcattaagagtgttcctgccatctcaaacatacaagctgagcgtcgcactgaagatcatagctagtggggagaagacctcacccactcaaatgtatcacaccattatgg

SEQ ID NO: 300843 - DNA, 406 bp, Glycine max
  unsure (1)..(406): unsure at all n locations
agcttagtttaacaaaacaacatgtgcttgctaagcgaacacatgcacattgagcgcatagcataatcagacaacaaacaacaacaaacatttgcacttaaatcaactaacacaaatattcatagagtcatgagcataaccaaaatcaacctaacatcaacacacaaaccaactaacacaattattaaacaagttacagaaaagaggagaaagacacaaaccaactaacacaattattaaacaagttacaaaaaagaggagaaaaagggtagaaatcctgggttgtctcccactaagcgtttctttaatgtcattagcttaacgggtcaaatgacttcaagacggcatgaaggtcacatagaacacatattccttacattntcacttcttagctagagactccatg

SEQ ID NO: 300844 - DNA, 406 bp, Glycine max
  unsure (1)..(406): unsure at all n locations
gtagcattccttggtaaaactaactttccaaatgtttgccttcgcaggaaatggccccgaggaagcttgcctcaaagaggtccaggaaggataaggcggccgaagggactagttccgctcctgagtatgacagtcaccgctttaggagcgctgtacactagcagcgcttcgaggccatcaagggatggtcgtttctccgggagcgacgcgtccagctcagggacgacgagtatactgatttctaggaggagatagggcgccggcggtggacatcactggttacccncatggccaagttcgatccagaaatagtccttgagttttatgccaatgcttggccaacagaggaatgtgtgcgtgacatgaggtcctgggtaaggggtcagtggatctcgtttgatgccga

SEQ ID NO: 300845 - DNA, 395 bp, Glycine max
agcttgtttctgtgtataatgacttcatttacatttatcctatagaattttttaaactttagtagcacaggaattcaaattaaattgactgaaacaattcaagaaacctccttaaaatatatgcattatgattcttgaacaagtaaacattctttcctcctaggatagtactattggagcaagaccaaggtgtaagtaaaaatgcttagcaaggtacattacaattagcaacgtttaaaatcaagtaaaataactcattcaatcaatattttcagcaaccaatgctaaagtttaaatatggcaccacgttattagttagtttattttgttaaaatattcctacaaatatcatggatatgggtttttttgtctatatttcctcttggctgattcat

SEQ ID NO: 300846 - DNA, 420 bp, Glycine max
  unsure (1)..(420): unsure at all n locations
gtattaatcttgaagcaatgcttaacctttgaatgtttgttgaagtaatcttgaacgcaaccttgtttgattattctttggcatcattaaaatcatgtattaatacattcacatttggtatccgacaggtacttcactcgggatgcaacaacacaaactatcactctaaagccaaaccctgagtttgatcagaatgatgtcatgcttttttttttttgctttaaagacatgtatgaaaactcacgtctctcatccaaatcagagtatgacaaggaagacacattcaatcatacgtgcatggtaaaatcttgcgtctagtaaagatctaaaattcaatgattaacatattttcttcctgaggcaagaaggagatgacgagttntataagagccttattgatagcatccctcttattcccac

SEQ ID NO: 300847 - DNA, 403 bp, Glycine max
agctttagtgcacacaagtacatatcacaggtgaagcataaaattgctcatgaaagtgggtgtttaaaagagcttctaccaggtttatcttatcatataagcacttaagtagaaaattgaaggtattcagttaagattatgaaagttatttatgaccctcctataagcttactgaatcacacacttatgacataagctttcatctcattttcatgcgataggctttgctgaaataaacaattaaattgtttatccaaacttgccccatcaaatgcacaaaactgatcttgaaatgcacagtagagactcagagcaaacagaaagataagtaaccttctaatacaatgttgacagtctgacagcatgaacatttgacatgtttggcacctcgtggatatgaaag

SEQ ID NO: 300848 - DNA, 534 bp, Glycine max
  unsure (1)..(534): unsure at all n locations
tcgaggtaggtggcattcttcttagctttgcttttgttatgcactgtatgtgtagcatttaaggtaggttagttgaaccttatgatagatgaaccttagggtagaggacgccggaaaaaatggcggaagcttggtgacggtgagccttctggaagacccgttaggggttcttccgaaacttctggaagaagatcttccaaacgatttccggaagaagagttcttccggaagtaatgaaacgacttccggaatgacaggtcttccagaaagttctcagaacacctcttccggaatgttcccggaagatgtatttcttccggaaacattccggaagaggattctttcggatgacctttcagtggttccggaagcactntccgganaacccttcttccggaatgtttccggaagaagtacttcttctgggaagttttttttctttttaaatattgtctttgttcatcgctttagcttattttttatatcattntagttgactatcntactacattattaattctaaatacttatgta

SEQ ID NO: 300849 - DNA, 391 bp, Glycine max
  unsure (1)..(391): unsure at all n locations
agcttgtctgccattattgacngaaggcacagaagacgacgttagtctctgcgtgttatcaagcttttcgtcttacagatagcaaaaagtttatacggataaccactcgggtatttcccgccgtcagcgtgactcaaaagtcagtatgacagatcttgtgagtgcggaagatgatgtaaatctccgcatgtcaacgggcttgtcggacgcgattgacgaaggtcgcaaaagacgacgttagtctctgcgtcttatcaggcttttcgtcttacagacatcaaaaagtttatacggataaccactcgggtatttccgcccgtcagcgtaactcanaagtcagtatgacagatcttgtgagcgcggaagatgacgtaaatctccgcgtgtcaac

SEQ ID NO: 300850 - DNA, 501 bp, Glycine max
  unsure (1)..(501): unsure at all n locations
ttgatggggcctatgcaggttgaaagccttggaggaaagaggtatgcctatgttgttgtggatgatttctccagatttacctgngtcaactttatcagagagaaatcacaaacctttgaagtattcaaggagttgagtctaagacttcaaagagaaaaggactgtgtcatcaagagaatcaggagtgaccatggcagagagtttgaaaacagcaggttcactgaattctgcacatctgaaggcatcactcatgagttctctgcagccattacaccacaacagaatggcatagttgaaaggaaaaacaggactttgcaagaggctgctagggtcatgcttcatgccaaagaacttccctataatctctgggctgaagccatgaacacagcatgctacatccacaacagagtcacacttagaagaggcacttcaaccacactgtatgaaatctggaagggangaagccactgtcagcacttcacatctttgaagtcatgtaca

SEQ ID NO: 300851 - DNA, 488 bp, Glycine max
  unsure (1)..(488): unsure at all n locations
cgcgcccncnnggccgtactgttatcacgcgancanctcggacccgggagcctctctatagatcctgcatgcacgcacgcttgttttttgttacgacccgcagaccgggcgggtacgatgggatgtcgagccacatgcacaagcctatcacgccacatattccaccattccacttttgccacctaacatcaaatgtcggacagtcgagttcttgaacgagacctacgtcttatcttcaccaaaccctcccaactcatctacttaatacagtatatatgatgacactcctattgaaatcgtcttacacatctatgtcccatgaccattctgctacgactgtcttgatgtcatgcattgttcgaccggattctgagcatatgacggtcatctttgaaatcagtgtgatgatcgcgcaacctcctgcatgatctcatctagatgatgctcattcttctgacctatgtgcacatactatctcttcacacacg

SEQ ID NO: 300852 - DNA, 380 bp, Glycine max
catggctgaaatggcaacatagggcatgatcacatcaatagctaaacactataacagtagttaaagattaacacagctggaaattgctggagttcacttaaaagatggcagaaaagttagcagcaataacatgtcactgaacagtcggcaatagttgtagattgccagaagttgctggcaagtcaccaaaaaggcatcagaagttgctggaaagttgctgaaaggttgcctgaaaattcaaagccaaagtgatacgttgttggaaaagttgcagatggtgataacttgctagaaaagttttacggtgtggtggatcatggcaacggtaacccacagggtgacagaatgcactggaagaataaaacaacggaggagaatgg

SEQ ID NO: 300853 - DNA, 395 bp, Glycine max
agctttcaatctggctcctgcttcaagctctggtctctgcaaatcttcacacagcaaaatctctcaaaactctctggaacttggacctttctctctctagaaaccctagacatgcaaagctctaaatcccagtccaaactctcttcacaaaatctgatttcaagcttaaataggtggccttgtttgtgcttatgcgctaagcgcacttatggaccgcttagcgcacattagtgaatttcggcttagcacgtgcctttctcgcttagcggatgaactgaagcggtgcacttagtgagatgaagcggtgtgatgtaagctccattggagcttgtaggcctacgatcttcatcaatggattcctttgcttcttggaagatgagtggcagcggaatgga

SEQ ID NO: 300854 - DNA, 296 bp, Glycine max
gtttttgtgatgatgtttgtgatgtttatatgctgaaattgctgatggaaatctgttagagatgaagggtagaattaacctagggttagaaagtgagaatgtgatgttgtgagtggaaaaagagtgaggcttgagagttggaaggctaagtctgaattctgtggtaaatggaggttaaagtgagttaatactagcttgaaatgtcatttagaacatgtgagaaaggttaggctgagctagagagaaaagcaaatgaccaaagtgaaccaagagccatttctagggcaaaattgggt

SEQ ID NO: 300855 - DNA, 394 bp, Glycine max
  unsure (1)..(394): unsure at all n locations
ttttgttaaatcttaattaaaaaggataaaatataatttctgtacccctattttttcaaataagtaatttttattttttattttttaattgagacatttcttctcttacttttaaaaattcattattttaattctcatttttatttgataaattttgtcccccaattttaaaaaaaaaatccacgattttagtttcatgactatcaaaggttggctatgtattttttataattttttttataaattaagcttattaataattaattaattttaaaaaaacttctttcacatgactaataatttagatataagactaaaatcatttttaattgagacatttcgtctctcacttttaaaaattcactattntaattctctcttttatttgaaaaat

SEQ ID NO: 300856 - DNA, 525 bp, Glycine max
  unsure (1)..(525): unsure at all n locations
aatctcctttgacatcagacaacttctttcgccaacaagctgactcagaaattggggggcttatgtactgtccaatgtccacaaaagggacatgacaagtaacatgatgcttcaacacacacgtcaaccctccatgtcagccttggaacaggagcacaaacgcatcgcccttagaaattaggctactggactgacaagttatctctaaacactttaatatctgaatattaataataatgttacaaccttcttattattaagtggcgggtactcaattatctataagatatgaattatctataagtaacaacttatctactagctattatctacaagttagaaattatctgttaaggttgttataccactgtaacagctcatacaaataaggacccanaactctcatctcactctataaatatcaggttctatctcaccattttcattcaattctaaactaactcacgtacttacttgaacgtcagagtccctttgtttgcaagtctcccttcgtnngtctctaat

SEQ ID NO: 300857 - DNA, 397 bp, Glycine max
ttgcttatcctatgcttctttggccgtcgttgcattagatatcttctcaaatgtatcttcatccaccgattgataaatgagaaagagagctttcttgtctctctttcttgactccttcaacgtctcctttacaccttgacttagcgaggcttcatcttgctcctcgaagccattctctacgatatcccacacatcttgagctcctagtagcgccttcatcttgttactccaattatcatagttgttctttgtgagcatcggcatttggaaaggaaaacctccattcgccatcttttgaggatcttgaagctctgataccaatttgttggaaataaggctttttatgtttaggaaaagtgtttaagaatattggagactctgaatagaaacttgatag

SEQ ID NO: 300858 - DNA, 532 bp, Glycine max
  unsure (1)..(532): unsure at all n locations
caattacaatgttttggtaatcgattaccagtgtgcttgaacgttgaaattcaaattcaaatgtgaagagtcacattttttcaaaaaaaagctttgtgtaatcgattacactgatttggtaatcgattaccaatgattgtttctgaataaatcaaaagatgtaactcttcaaatggtttttgactttttcaaattggttttaagtttttctaaaagtcataactcttctaaatggttctcttgaccagacatgaagagtctataaaagcaagactntgttttgcattttcacaaaaaaaaaaaaaaatccaatcattaatctacacatctatcttttccaattcattctttacacaagcaattnttccacattgatttctaagtctctttgaacttcttcttcttccttttgccaaaagttttccaaagttttctagttttctaaaccttgaaaacttgngttattcatctttntcatctcttctcctttntcaaaaagaattcgtcaaggacttaaccgactgaatatttt

SEQ ID NO: 300859 - DNA, 405 bp, Glycine max
  unsure (1)..(405): unsure at all n locations
ttgctttatgatgatgaatcaagttgattcaagtagttttgataatgacaaagatgatgacaaaaagcccaaagaatgatttcaagattaagtcaacaagttcaagatcaagtttaatttcaagagaagaaatcaagaagattcaagaatcaagagaagtttgatttcaagattcaagagaagatgaattcaaggttcaagataagaaatcaagaagacttcacaagggaagtattgaaaatattttttcaaaaaaaaacaaacatagcacagttttgtttttcaaaagagtttttctcanattttctaggttgccaaagtttttactctctggtaatcgattaccagtttcctgtaatcgattaccagtggcaaagttcaatttcaaaagttntcaactgaatt

SEQ ID NO: 300860 - DNA, 494 bp, Glycine max
  unsure (1)..(494): unsure at all n locations
cacattaggtctttggtttatggttttaattattagcttgacagttcattgtgatgacaagctgtattctgtgtgttttgtcttgttagtctcgtacagtctttcattcgccaagttggtaaacataaaatgagtttgaagagttgtgtcttattttgtgttcgtactgtgacatcctggaaatttctacccggaatttttggaaacaatgtattttgaatgattatatatatatatatatatatatatatatatatatatatataagtattattcagtgtatatgcatatatgttcttgatagaagtaggaatagtgcgggcaagatatgcgggttatgctaattaacgaagagatatccataactgtgaggctatgggttaattcttaattaattagtttagaaatcattggtgtgcgtgtgacttacaatataacgagaccaacctctgaaccacgctgcgggttgtattctgaacgctntgatatatata

SEQ ID NO: 300861 - DNA, 373 bp, Glycine max
  unsure (1)..(373): unsure at all n locations
tagcttgtttcaaagaaaatttgtcccaaattttggggagtaattatcaaggtaaatttgttccaaatttggggcagacattgngtaagaattgaaatggtcaaagtaaatggaatacccacactaattntgtatatatgcataatgtttctatttattgtgtcaaaaaaaactgtaagtacaaatgaaattaataagtgtgtatgttgtaattccatgaatgaaagctgagtgcctaaataaaaggcaagtatggggtgggaatgaatgaaaaagtgaaggtttatctatggatgaatgctctcctagaacctaagcttttgaatcctagaacaaccatgatttgttggcagcctaaccccattacaagcct

SEQ ID NO: 300862 - DNA, 443 bp, Glycine max
  unsure (1)..(443): unsure at all n locations
tttaatggattttcaaggtttgagaagtgaaattgagaatggggtaaatttggagtaaaaccttacctcacacaagtctataacatcaatttaaacttgctcaactggatttacacctaaaatttcaccgaattaaaatttgactcctcaacacccaattttatcctagaaatcgctctttgttcactttggtcatttgtttttctctcttgcacaacccanactttctcataagtcctaaatgacatttcaaactaggattaactccctttaacctccaaataccactaaatccagaattggccttccaaatctcaaagtctcactctttcttcactcacaacaccatattctcaccttctaaccctagggtaactctacccttcatctctaaacagtttccattagcaatntcagcacataaacatcacaagcatcatcat

SEQ ID NO: 300863 - DNA, 394 bp, Glycine max
tagttgcatgcaaaagcagcactggattaagtgactgcaggcttagcccaacatgtcgcattgagcccatatcctcattgtgaaaacaatgagcttagcgagtattgactcgctgagcgctttcaagaacttccaattggcctcttttcttctagatgctcgccacgtgtccttccttgttgtgtttctcgtgcttagcgcgtacaggcacgctgagcgagctactccaacttcaaaatcttcaattcttcttttcctacaataaaacattaaaagctaataaaatttcttagaagttaaagacactaaacttactcctaattaatagttatattagcataaaagtgattaaaacaaagttctaagtaatgaaaaatgtaagataaatgctaag

SEQ ID NO: 300864 - DNA, 512 bp, Glycine max
  unsure (1)..(512): unsure at all n locations
caatttttcatgtacaattgtacatgaattgttatgttatgctattcttcttccgttgttagtgcatactattagtatgctctttatctttcattgtttgaggttctgatagagaattagttataaggatagtttggtggttgaaggaaaaagaaaagaagaagaggtcgtgggttcaaaatttaaattcctctactaacaaaaactaacaaattattaacttaaatttgtctttctggtttaggaaattggctagttatatgagttcaatcaagacattgagcatgctaaatcatctttagctgaactgtttgttcaattaagatgatgagacatttagagtatcggtttccatttcaagcctctcanaattttattctttaaaaatacaagtaatggtgtacgttttttgtcgccaagctaactaaacttattatagataattcaccttcaggtagtaagcttatagtggaaaattatgaatgcanacttcataaacaccatcattcaca

SEQ ID NO: 300865 - DNA, 158 bp, Glycine max
agcttttatctgtttttgcaacgctccacatgttctttaaatggtgtaatcaattacactatatctgtaatcgattaccagtgtatctacacgctgaaattcaaattcaattgcgaagagtcacattctttcataaaatgcattgtgtaatcgattac

SEQ ID NO: 300866 - DNA, 347 bp, Glycine max
  unsure (1)..(347): unsure at all n locations
agccccgtagngtgtgcttaaatgtctaaaataaaagaaaaattatgtaataatgcctctttgccgaaaattttatcagtgaaaataaaatattttgcatccgaatctttgccgatccttcccccaccccacctcctnttccccccccccaccctcccctcccccccccccctccccccccctcccccccccccccccccccccctctcccccccctccccccccccccccccccccccccccccccccctctcccccccctaccccccccccccccccccccctcccccctccccccccccctccccccccccctctccccccccccccccctccccccccccccc

SEQ ID NO: 300867 - DNA, 547 bp, Glycine max
  unsure (1)..(547): unsure at all n locations
agccgaacacatcganggattgattgggttccgaagtaacaatttggcaatttnggntaaccggaacaattggccccttccttgcattttcaaggcttggggaaaattgggcgaggtggagggaacgcccccgccatttacgcaacgagcataatgtaaacctttacggttttaaaagctctatagttgggcctaggctttagagnttttcctattgttaaggctttgcgtcctttgcttcctgccctatcccctctgcactcttctttctcctttcgtgtgtctctcccctcttccttcacttgccggttactctctttcctgacctcctgactctgcgcttccctcccgtgctgcttctcacttctcttcttgcttcctccgcctgcgtctcatctctatcttactccccactcctcctcctgtggtggtggttggagtcgtctctccccctcctctcttctctctacctctctctttcctctgacctccctccccccctcctctttcttgtccccgcattcttccatctcaatcctttgtcccg

SEQ ID NO: 300868 - DNA, 265 bp, Glycine max
agctttgattcctatgcctagggtatatgtggggtaatcattctagcccttatgaaactacatacatgctaaaaaatggcaaacatacacataccaaattgtttcataggttattccccacaaaatcatgcgcaaatgccatcgaggcatttcaccgaacacttggtgggcatatgtttaggcatgaattgtaggggaatggcggcaatgtggcatgcccaaccttttcaaaacacaacttacgcctaaggccattgcctacaac

SEQ ID NO: 300869 - DNA, 223 bp, Glycine max
  unsure (1)..(223): unsure at all n locations
atgacaaaaggtgcagaacacgacgttagtctctgcgcgtcaacaagctcgttttccnctggttgacgaaagatgcggaaatcaattgccaaaccggtacccccggcctaccaacttgactttcccgggtcagggttaacagcaattgtttgtacgaataatcgcttgcgtatattcgcatgtcactggactccacgggtctggatggcaaacagtgtagacg

SEQ ID NO: 300870 - DNA, 330 bp, Glycine max
  unsure (1)..(330): unsure at all n locations
gcnnatagcggtcatttaagcagaatgcaggggaaacacttaaaaccggcccgcgcaataccctaaatggataacaattggccctggncgacccctaacccgccccccccggccccccccacatcaccctcctactcccccaccccccctccctcccccccccaccacctccccccgcccccaccccccccccccactcacccccaccccctccccccccccccccccccccccccccccccccccccctccccccccccccccgccccccccccccccccccccccccccccccccccccccccccccccccgaccccccccccccccc

SEQ ID NO: 300871 - DNA, 233 bp, Glycine max
tgcattagatttttgctccctcattgaaaattaagctaactttggatgactaccaaaattttttagacattaatgatttcttaattattatatataagaacaatttgccatccaaaaactaatatattgtttaaaaataatccaacgaggcaacgataagaggctttgaccaaaataaattaacatgaggctatggaggaagcagcagagcatattacgttaagactaactta

SEQ ID NO: 300872 - DNA, 497 bp, Glycine max
  unsure (1)..(497): unsure at all n locations
ccgccccgcggcgcggnnggtgtacatgctactctaggcgagtcgagctcgtacccgggatctctagaggcgaactgcggcatgccagcnttgctcaaagttggccaggaaggaccagggaggccgaggaacataagttcggtccggaggatgagcaggaacggtttaagaaggctgggccccaccaacgcctttagggcacccaggcgccggctgccccccccgcacccacccctccaactcacccccccccccctaccccccccctccctcccccacttccccccccccctcctccctccctccccctatccctccctgcccccctatccccctcccctctcctcctcccctccccccctcccccctcccctcctccccctccctccccccacacctcctcaaccccgcccgccccccccctacccccccctcccctccgtccccactcctccgaccccctctcccctcccccctccctctcctcgcccgcgccg

SEQ ID NO: 300873 - DNA, 148 bp, Glycine max
  unsure (1)..(148): unsure at all n locations
agcatagcaactagtggaagggaatgagaggtgtcgcaacctacctttcggcgggaggccgacgcgtgactcgcgncatgcgtgttccacgaaaggaatacgcacggagtcgccaccaacgttctattgaggaaaaccgcgcacaacc

SEQ ID NO: 300874 - DNA, 169 bp, Glycine max
  unsure (1)..(169): unsure at all n locations
agtttcaaaccaaatttcgagaagatccaacggttaacgaaggttgggcagcgcttttaccgaaacagctcatgtaacttccttaagaagcttcattaagtggccttctcaagaagcttcctcgcgacttctttgncacactttctcacgacgcttctttgacaaccta

SEQ ID NO: 300875 - DNA, 370 bp, Glycine max
ggcatctaacaaatcttgaagttgaacagcacttttaagttttgtctgcacacaaaagatcattaaatcaagcaaaagaggtaaaaaaaaaaaaaatccagaagatcaaataaaagtagacaaatattacacaaacactagaaaataatatcacctcagctctaggtcggcctccattgtatttcaacattaggtttagcagcttttcctcagcaacttttagcttcaccttctgtttgggagctctatcaccactgccgtaacacgagagtcaatggccagaacaagatgcttaactaacttaagcgtaaacggcgacagaacatactgaccaacatcacgcactacccccgtacctctcagattgtcc

SEQ ID NO: 300876 - DNA, 247 bp, Glycine max
tgctttctatatcatgtggcgaagaccgccacaaatgtagttgtattaaccgaaatagcattgtgacaacaacaaaggggattttccaaggccccaattttttctctcctccgtgtacgcccctacacccttttccatgattcatcatcccttcaaactcaatattgaacgggccatagtgccagcatttgcaccatacatttacaaaacatcttcatcaatattaccacctgttgcccccgcaccg

SEQ ID NO: 300877 - DNA, 196 bp, Glycine max
tgacatccactccacaaggtttgaagcagaggacaccttcaatcctattaacgcaacgtggcggacaaaagtgggcaaattaactttgaatgcgcattattgtcaatgcggaaggtattatgcgcttcactatccatgttcacatattattgcagcttgtggctacgtgagcctgaactactaccaatatatagat

SEQ ID NO: 300878 - DNA, 271 bp, Glycine max
accaccccaacacataaactcgcccccctcgcccccccacccagttccctcacccactccactccccccccctccctgccacctcccactcctaacccccgccctccccccccccaccctcctcaccccgcaccccctcccctcccccccctccctaccttcccactcaccccccccccctcccctccccccctctccgcctcccccccccccccccccccccacccccccccccccctcccaccccccccccctcctcctccccccctcc

SEQ ID NO: 300879 - DNA, 216 bp, Glycine max
cactcctcctaccccccgggcctcttcacccccactgccccatcccctcccctccctccacccgccttcttcccccccctccccgtcccccctcgcgcccctcccctcctccccctccgccctcccccccccccgccctccccccccctcgccgtgcccgggacccccccccccctcccccccccccccgcaccccctcctccgcccttccccccc

SEQ ID NO: 300880 - DNA, 77 bp, Glycine max
tttctttggactttatgagtggcaagttgaggtctaagtggattggtcctttcgctgctactaatgcttttccttat

SEQ ID NO: 300881 - DNA, 209 bp, Glycine max
ttctgataaatcaaaagatgtaactcttcaaaaaggttctgactctcttaaatggtttttaagtttttctacaagttataactcttctgaaggggcttcttgaccagacatggagagtctataaaagcaaggctttatttacattcaaaaaaaaatcttgaatacttttgcttttcaatcaatccttacaagcttgaaactcttgaact

SEQ ID NO: 300882 - DNA, 199 bp, Glycine max
  unsure (1)..(199): unsure at all n locations
tgnttanattatcgaaattgcctaaatcattggcaaatatgcatgtgaattaggaagcatcgacaagaatcaagccaaggctattatgcaagcaagcaatggggccaaacacaccaaaagattatgatgatggatggctcgaatcctcacaaagggaaacttatcactttcaaaactatcatgacatgcaaaggaaaaa

SEQ ID NO: 300883 - DNA, 453 bp, Glycine max
  unsure (1)..(453): unsure at all n locations
aaactgtttacacataagctgcaactattgaaatttgaaatcttaacattntaaaacactagtaatcgattactaccttctggcgatcgattactagagagcaacaccctttggcaacgatcttgccacacccccccgtgctaccccctgctatcgaacactttttcacgccttacactgcgcccaccctccccctcgaccctccctcccctccaccccactccaacgcccccccccgcgcccctcccccgaacacctaccctccgtcccccccactcccgctactcttcgcccgccctccacccaccctcgtctaccccaccctctcccccccctccccctgcacaccgcgccactccccccctcgccctccccccccctcctcactcccgccacccccctcccctccttccaccccgcccaccccctcccctccccccctcgcaccccccc

SEQ ID NO: 300884 - DNA, 402 bp, Glycine max
agcttatataagtttacatattcaaatttatgtgaaaatagaatttaatcttatatattatattctacagataatatataagagtataaaaatataataaattaaaaaagaataaactttgaattttgaactatttttgcatacaatttatattaatactatattttgtactaaatattcaaatggtcacatggttgaaatgataaaagagtatgtcattcactccaaggactgtggttccaatccttccaagcatttttttaaacttcttatttcttaagacaatattggtcaattctttagtgtaatcaatatttaaaatttaacacgaaatgattaatcaacagaattctacaattatgtcttaatttaacatattcattaaccaagatacaataatga

SEQ ID NO: 300885 - DNA, 517 bp, Glycine max
  unsure (1)..(517): unsure at all n locations
aataagtaacatatgtatgggaaaacacatacaggaaatggatatttctcaccatacaaacgaaaaaaaaacataagttattgtccaaacccataaatcacaccaaaccaacacaatcaaagaaaaacacaaccaaataaaattaaaacaaataatgaaaaaaaaattaaggaaaatgaagaagtgggtatggtgagaaatgatagaagactgacacatatgtgtcctcgccaattagctccaacttctcgaaacaaatgatgcttctttaaccccacaaaggagactcgttcacgttgagttgcccaggggttgccatagccattactcctcctcgcaaatcctagaggctcttcttctgcccttaanaaacaccgaagccgaagagtatcgaaagaggatcttttgcatcaagtgatcgaaggagaaaggcgttgagttaaaaaccatgcatgtacacgttacaatgtttcgaagatacataacacttgatacgaangagactacattaattgga

SEQ ID NO: 300886 - DNA, 398 bp, Glycine max
agctttattctgctcgattgctccaggttgctgcatggaagggcaaaggtctgtatggtggtcaccagaggagcacaaaccacaaacccttgcaacaggtacagatttctgattcaaggccagctgggttacgaagttaaccaatgcatccagtttgccttcaagcttcttagtctcacatgatgcacctgagtttgtatctacctcatgcactcctctaatgactatggcatcatttctggccctaaactgctgacagttgcaagccatcttctcaatcaaatttctggcttcagcaggagtcatgtctccaatggctccaccactggcagcatctatcatacttctctgcatattactgagtccttcataaaaatattggagaagaagttgctctg

SEQ ID NO: 300887 - DNA, 422 bp, Glycine max
  unsure (1)..(422): unsure at all n locations
aaatctgcacctgtcgcaagactctatggtttatgctcctctgacgaccactatatagacctttgcccttctgtgcagcaatcttgagcaattgaacagccttaagcttatgttgcaaacatctacaatagacctcctcaaccttagcagcaaaatcaaccacagcagaacaattatgacctctccagcaacagatacaatcccggatggaggaatcaccctaatctcaaatggtctagccctcaacaacaacaacagcagcctgctccttccttccaaaatgctgctggtccaagtagaccatacatttctcctccagtgcaacaacaacaacaacatcaacagagacaacaatccactactganggccctcctcaaccttcatgggaagaattagtgaggcacatgacaatatagaacat

SEQ ID NO: 300888 - DNA, 399 bp, Glycine max
agcttgactattctcgacccaccccgggcatagtcggtcagtgagaacctgtgatgtacctaaacaggcaagctcctggcagtcaacagataaaaggaacaaagaccacaaagcaaggaggcttgtggtggctggccagctgtgaattttgtgtgatatgtggattatggcctctggtaatcgattaccaacggtgggtaatcgattacaaggcttaaaaatgaagacaggaggctaagatggtctctggtaatcgattaccaaggggtgtaatcgattaccaggcttgaaaacgaagtcaggaaactaaggaagcctctggtaatcgattaccagcctgtgtaatcgattacacagaggaatgggtcactggtaatcgattaccaggtatgtgtaatc

SEQ ID NO: 300889 - DNA, 541 bp, Glycine max
  unsure (1)..(541): unsure at all n locations
cctctcataactaagctcacctccttgagaagcttccttaagaagattcctaaagaagctagagcttagctacacgtacctctctaatagctaagctcacctccttgagatgagaagctagaacttagctacacaccccctataatagctaagctcacccccatgacaaaaaaacatgaaaatacaaaaaaaagtccttactacaaagactactcaaaatgccccgaaatacaaggctaaaaccctatactactagatggccaaaatacaaggcccaaacgaaggaaaaacctattctaatatttacaaagataagcgggcttatacttggcccatgggctcgaaatctaccctaaggctcatgagaaccctagggccttcccttggatctctagcccaatctacttggagtcttctacccaatgcccttgcgggataggattgcatcataacgtatctaccatanatgcgatcatcntccttttcatcatgggcggtacgacttgggctgcgagaatctctcatcttnttgcatattcct

SEQ ID NO: 300890 - DNA, 401 bp, Glycine max
  unsure (1)..(401): unsure at all n locations
agcttattttatcatgacaatttgtgtttgcatgatagtgtaaaaaccctatatacaatcaatgcatgcagtatttgctctctaatataaatctatacaaacattgatagaattcagtaagacaaaaagcatgactcacaaatgaaagtgttggcataactgtgtgcacatcctacagccacagccacctcacctacatgaacaattcacagccgtacaatctatcaaatacaacaaccagttcaccaaacataaacaacaactgattggaattaaagtatcaaaatcaggttatcaattgttcgacacatccaaaccctatgaacaacaacaacaacacgaagccacctccattcatacatcatataatagctaanaattccaaggttaagcagaaacac

SEQ ID NO: 300891 - DNA, 521 bp, Glycine max
  unsure (1)..(521): unsure at all n locations
atcctaagcccaaatactaagatacaccataactaacaactgttctttgatgaaaaatatcataatgttcacacacatctcttagatggtccatgcctcataatgatgtagtcaaattaaatgtagatgacagctgcattaatgggggaaagcttggaagagatgtaattagatcaagtaatggtgattggtttgatgacttcacagctttctatgaccaaggtgacattcttttagcagaatttcttgctacaagagacaggctcaatatttgcttggataatgggttgcaaggtgttgatatgcgagttggattctttggatgccgtcaaactcacatttatgactntggcagtacaatagacctacatcaataggacccacatcattacgctgaagttctttacgacatcagcagtatcattcctaatcgatggaaagtggtcatcatgcanatgttcatcatgcataccccttangagaataataattgtgctcgactacatggctanacttggagt

SEQ ID NO: 300892 - DNA, 404 bp, Glycine max
  unsure (1)..(404): unsure at all n locations
agctttgattttcatacattactttacatgcacatgcatgagtcattaatgaatgctcaaagctgtctggattgaattggcctaattnttttgctaaacttgctgcactangatgggtacattgcacatgaattgctatacaatatcaaattctttctttcaaagtaatacacactgagttgtgatttttattanttgtatggtaacacatacaattaataaaaaccacacacaattgattgaattcttggtcgtcatacttgggataactaaaataatatggttgtttttcatgcaaaataatttttatgctaaattttagttggatgtgcctttgtaggcgatggctctaaagctctttgctataagggctaagaacgccaccacaggggagggatctaatg

SEQ ID NO: 300893 - DNA, 409 bp, Glycine max
  unsure (1)..(409): unsure at all n locations
ctgagagaatttgctgtgtgaagatctgcagagaccacagcttgaagaggaagccgtcctgagagcttgagatgagtttgtgagtgattatgaggtcctagaggtggaggagacatccccactacttgtatttctgcaatctttcatctttctcttctctttgttgtaaaggaagctaagctttccagttatggaaagctaaatcctctgttggatcttccttgtaggtacttgatgtaaatatcttttttatctatttaatgatgttttgtgtgttcactgtgctatcagaacttcattctaccatgcattgccttgatcatgtagatgcatgtgtttttaggatcattcaacagtggaaactggtctgattcttacaacttgataggatagggctagtntgtcatat

SEQ ID NO: 300894 - DNA, 197 bp, Glycine max
aaatgaggtactgaaacagcaatttccatatcatcaagttctttcattatacatgcactgcgaacttaaaaaacaacgttgaattaactatcatatctgcgccaaacttctgtcttgattctccgatctaaaaaatctatattagcaatttctctaatattctaacatttattgctggattattgaggcgtaaaact

SEQ ID NO: 300895 - DNA, 113 bp, Glycine max
cctttacatgacttctgaagtgaagttacatccactctattccaattataaatgggtgtatttaaataacaaatttactcaacgtctattaagatcttacaatatgatttctg

SEQ ID NO: 300896 - DNA, 400 bp, Glycine max
  unsure (1)..(400): unsure at all n locations
tgcttattttcttcgtaaaatattatagtgtcaatggcaatcattttcaaaattatttccaggttggttggcgggtatagataagcatcagcggcaatgcatatcacgagccaattgtttttttttttgctggaaattaagagataataaaccaattatatatatagcaggcttattgtataactttaaaatgtttgtctgataatcacgatcaggataagatcaatataataaaaatcaaaatcaaatatagaatgtaatataacaaaatggcttggtctttgtaaaaggaaaacataatctttaaaaaaagttagatgaaaaaaaaaagcaaaaaaactctactcttggaccttggtcctcattctcatttctnnccctctatttgtagagacatatg

SEQ ID NO: 300897 - DNA, 446 bp, Glycine max
  unsure (1)..(446): unsure at all n locations
gaataggatgtcaattatgtgtctaccagcactaaagttgcacgaaatttctacttgcctttatgaatagttgatggccacgcgtgttacctctaattgcactaaaattctcaaccagatttggtgcatatgccgccatgcgtttatctacacccaaaaaaatacgtgtcaatacaccctataagtatgtatagtgggctgtcatttatctggatgaaatttgaagtgattattctatgatgatacccttaattagcaccgttgattctccattataagcttcagcaaattattcgtgataaaacgttcccctgatactctcgtttcatttaaaaaaaaaaaaattaaggattntgtttactctccgatcgttaatagcaagttcatcaacccttagtgcgagggccccaccatgtccattgaagctttncagcagtaccatgtct

SEQ ID NO: 300898 - DNA, 390 bp, Glycine max
ttcttatacatatttttactacggaagaagtgcaataaaagggaaaacaagtatccccttgccgagtgaagtatattggcatcgactcctttcacggatgcactcggaagaaatgaccattaaaatccttataagaggtactataagggccaataacgactctcctgaaaataccagtaagagaaatccaaccacccttgttattttctttaacattttagtggtggaggaataaatgagcaagagttatgaaatactcatcacacgaaaccctaaaggcacagatgcccactcaggcattcaaatgcaactcggtgagggtgacattcagctctcgaccaacgtccacccgaaacttttcaaaagggacaataaggtgaaaagtacaaa

SEQ ID NO: 300899 - DNA, 472 bp, Glycine max
gggaatcttggaacccaaaccattcttgggaagggttcaagattgcaatctcccaaaggtttcaagcgtctaacctagggaatcctttcaggcattgctggcactggaacaagaagaaacagtgcaagaattcataggccaattcgagaagcacatcggaatggtgaagggattggaggaaccatttttggtggagttgtttctcaaggggctaaaagaagagatcaacactgacgtaaggctccatgaaccaaaaaacttgatggaatctatggtcaaggtttgtagggtggaagataagaatcgaatcttacgaaagttacccagagtaattgtaaggcgtataattttcagaaacctagttattcgggtgagagattggaagggattgcaaccagccatagtaaggagctgacctataattcggtaaacaagatccaggatggaaggagaagaccttcataattgcacc

SEQ ID NO: 300900 - DNA, 391 bp, Glycine max
tagctttactttagattctagcaatgacccactaacctagaattaaaataacttaatgccattaacctaaggaattaaaacaaactaaatggctgagtgtaactgaaattgttggcaaccaaaagtcacccccaacagccaacaagtcagccaccatttggtctcccaaaaggctgatgcctaggttgccaattgggcccttattacaacttgaactaaagcccttttagttgattaacccaaaacatatttttagtcagccaactttacaaggattgggccattatttacacaaactaaacactctaaaattgaaataaagtggtgtcatttagtcctccatttgggccatgatacaactcacaaccttggacttttcttcttgaaactt

SEQ ID NO: 300901 - DNA, 326 bp, Glycine max
cgagagctaccattgttcattttcaagggtctctatttataatgcccctgagtctgacctccgcgggaaaaggtgtgaccattggactttctagagagctacgttggttaattttcaagcgtcgctatatataatgcccctgagtctgacctccgaggtaaaaggtatgaccattggaattgctcaagagctaccgtggttcattttcaagcatcgctatatataatgcgcttgagtctgacttccgagtgaaaggttataaccatgcgaattgctcaagagctcgctttgtacagttccgagcgtgttgttatattatgcgcctg

SEQ ID NO: 300902 - DNA, 407 bp, Glycine max
  unsure (1)..(407): unsure at all n locations
ttgtttatcttttccttcaacatacattgttgtaactttattggttgtataaggaagtgtcaacatgagaaaatggtcatatttgcttagccaatcaaccaccaccatgatagcatttttcccttgtgatgttggcaacccctcactaaagtcaatggtaacatcctcccacccttgatctggaattgcaagaggttgtatcaaaccaactggcttctgggtttcatatttatttacttangaaggcaattgaatgtttatcttgngagagcaccgcacctatcacaatatcacttgcatctgtttttacagtgaatggtcaagaaaatttgacatgacaaatgttggtgtagacatcatagttgtctttaactcttcaaaagccttggaagatgactctatccaag

SEQ ID NO: 300903 - DNA, 399 bp, Glycine max
ctttccattcaccacatacacactcccaatttgacttttaaagagaataacaagactatatttatactgtcagcttcatacagaataaatatgaacataaatctgttagatagaaataaatgtgaaatatatatctttttttaaaaaaagaactaaccatcgcaatagtgtcttctacatcatccttgtttctgcctgccagacgcctttttaaggattcaagtgcatctctaagcttcttcaaaagaacatgtttttccaatgatgctgcctctctaagtctagcctaaacttcaccagcatacaaaaagctagttaaaacaggaacatcaatctattagtaaactatgaatataatcattggttatttcagttgcaaaccatttacaataagaatct

SEQ ID NO: 300904 - DNA, 398 bp, Glycine max
agcttgaaatatgtgttccattaaaaaagaaaaaagtttgtaatatgtgattcttttgttatggtaattaataataagtatagaataattttacattttgtttactttataattgatatgcatattattaatatgttaaaaaaatagtattaaatatcaagtgatccataaattattatgatgttacaaaaggattagtaatatcattttataataatattaaataaaagtaaaataatattttaattaaaatatcttacaaattagtaaaaataaaattattttaaaaataatatagcattattatgtaaatttaattgataaattttaaattatcataatagattagactaacagaaaaaactgtcaaacaaaacaaaacgaaacagtacaaatta

SEQ ID NO: 300905 - DNA, 501 bp, Glycine max
  unsure (1)..(501): unsure at all n locations
aaacatggtaccagcttgagagttaatcaaaaaattaatgatgcatctttgtttccgatcagtccatgcatcggacataatagtacaaccatacttgacccattgctccctatggcctttcatcaaattttcagtatattcaacttccttcttcaagagtggaactctgatgtcatgatagctaggaatgggcaaatgtggcccatattgaccaatggctgcaaccatgttctcaaagcttttcaatttaatgaggttgaatgacaaacctgcttggtaccaaaagcgagcaatatgttgatgcaccttcaatacttcattcttatccattgactctcttatgttcatttgcctcagcatctccatttttctccgatngattgcattntctggattcttacagaatntgtccattggtccttttttagtcccacactttgtctttgcacttgcagcagcattacaagagtccgcanactcatcttcttcacttccatcaca

SEQ ID NO: 300906 - DNA, 397 bp, Glycine max
agcttggaaggtagtcatacctcacaaaatgtatatatatgtgtatgtttaggtagaaagataccttggatatgcatgtatgtagcaaaaaaatacttcacaaaatatatatatatgtatgtttaggtagaaagataccttgaatatgcatgtatgtagcaaaaatacttcacaaaatatatatatgtatgattaggtagcaagataccttggatatgcatgtatatagcaaaaatatctcacaaaacatatatatgtatgtttagatatgcatatatatataataaaggttgtctagctaaaaaaacaacatgcttttgaaaagagatgacttccaactcttctttgaaaaaatttgctgatcataactagttcttgaaagaatgtgtatacacct

SEQ ID NO: 300907 - DNA, 526 bp, Glycine max
  unsure (1)..(526): unsure at all n locations
ttccgctccggagtatgatagtcaccgctttaggagtgctgtacaccagcagcgcttcgaggccatcaagggatggtcgtttctccgggagcgacgcgtccagctcagggacgacgagtatactgatttccaggaggaaatagggcgccggcggtgggcatcactggttactcccatggccaagtttgatccagaaatagtccttgagttttatgccaatgcttggccaacagaggagggcgtgcgtgacatgagatcctgngtaaggggtcagtggatcccgtttgatgccgacgctatcggccaactcctaggatatccgttggtgttggaagagggccaggaatgtgagtatggccagaggaggaaccggtctgacgggttcgatgaggaggccatcgcccagctgctatgtataccgggacaggattntgcccggactgctgcanggaggcgagtgcgaatcatgcgcaccaacatgaccacnctgacccagatatggatgaagggtgctctcagcaacatc

SEQ ID NO: 300908 - DNA, 407 bp, Glycine max
  unsure (1)..(407): unsure at all n locations
agcttcttatccaatgctcatcttggtggtgaagctccttcttccatggtttattccctagtggatggcgcctcctctcaaagagcttaagggaagtagtaatgggatcatcggcggctatcgtaaagtggctaagagtccgcacacaaggcttggactggctcccaaagccaagggctatgagagaggaagaggccgaagctccagaaaagagtgaggaggtacaagccttanaggcagagcttgagaaggcttaagcagtcaaggagaagttcaagtcaacaaccatcaaagtccaaaaggagtatgatgaactgaaggacattaacatggccaccaccgaagccttggaacaggaaaccaagagggcccggaaggaagaacatggccaaaacaagttccgagga

SEQ ID NO: 300909 - DNA, 496 bp, Glycine max
  unsure (1)..(496): unsure at all n locations
tgtgttttgtatatttctattctcgtttcatttactttttataccccctcttgacgtgcttaagccattttacttaagtcatttctcgcttaacctaaaaataaaataaatttctaccgatcgtttgaattgtattatccgttaacttcggttaaaatgaattccaaccgttcggtcgtgccataaccacgttggaaatcaaaaaagaggtaaataataatataataatcaaaataacatcttttaggtaaaataaagcggaaaatcaatcggacattttctctttgggatttctcattcttaaccgaattgactaataactaaagtgaaactaaggctaaaatcaactcgcctagtcaagctcgtccataaaaataggttttttgaagtttgtcatttcaatttcttactaagtaaatggatcgttnttcaaggtccaacgccttanaatgatcaccttanataanaagaatcacttgataagaaagaactacgt

SEQ ID NO: 300910 - DNA, 402 bp, Glycine max
agctttctattttcagtagatgaagatgaatctgtggccacctcatggactcctctaaggacaatagcataatttcttgcactgaattgtgagttggaaaccatcttctcaatcaaattcctagcctcagcaagggtcatatcaccaagagctccaccattggcaacatcaatcatactcctctccatgttgctaagtcccttatagaaatattgaagaaggagttgctcaaaaatctagtggtgaggaaagcttgcacataatttcttgaatctttcccagtactcatacaagttttctccactaagttgcctgatgcctgaaatgtcttttctgatggcagtggtcctagatgtagggaagaatttctccaagaacaccctcttaaggtcatcccagcta

SEQ ID NO: 300911 - DNA, 416 bp, Glycine max
  unsure (1)..(416): unsure at all n locations
atcgattacaagatattggtaatcgattaccagtgtatctgaacgttgaaattcaaaatcaattgtgaagagtcatatcctttcataaaaagctttgtgtaatcgattacatggttttggtaattgattaccagtgacaagttttgaataaaaatcaaaagatataattcttccaatggttttcaggtttttctaggtggcaaccacctcctccgttttgtttaaaaatgggcttccgggacacccgtaatgctttcgtaaaattcccataatcctaaataagcatatttcatttaaaacgggtgagaaggaagagaaaaaagaataaaatcaagttctataggcttccgtaacttttccgtanattacgaaagaaggagggtgaacttatcanaatagggggtgcaaatagcaat

SEQ ID NO: 300912 - DNA, 405 bp, Glycine max
agctttgtttattggtcttcaccgcgaaaggatcgaattgggtctgaaaagaggaaaatttaaatcatcctgcttggacgaatgagaaaactggggcaaatgaaaagggtgagaatgaaagagaaacccatgttgcgaatgtcattcctacatggccaaacttcccaccagcccaacaatgtcattactcaaccaatatcagctcttctcattacccaccacccagtcatccacaaaggccattcctaaatcaattacaacgcctgtctaccgcacgcccaatgcccaaacaccacctttagcgaaaaccaaaaaggaattttgcagcacaaagcctgtaggattcaccccacattccggtgtcatatgctaaccttgctccatatctactcgataatgcaatgg

SEQ ID NO: 300913 - DNA, 456 bp, Glycine max
  unsure (1)..(456): unsure at all n locations
caccaaccaagaaatgaattttgcagcgaaaagcctgtaggattcaccccaaattccggcgtcatatgctaacttgctcccatatctacttgataatgcaatggtagccataacccctgctaggttccctcaaacccccatttttctgaggatatgactcgaacgcaacatgtgcatatcgtggagggccctgcggcattccattgagcactgtatgaccctcaagcgtaaggtgtaaggtctaattgatgcgggctggctgaaatttgaggagaatcgcgtgtaaatcctgacattgacaagagatgccacacatggggcaattntgaaagctgttgttagatgtctctaatgactcatcaggattttcaggtgcgagccattggtttgtttgctcgagcgacatgcgctcctgagtgctgacttccaagaccgttcaatcagagattactcgtc

SEQ ID NO: 300914 - DNA, 400 bp, Glycine max
  unsure (1)..(400): unsure at all n locations
agcttgtatttaaatggaccaaaaccttatgatcagttcttganagtctgattagtctgtgttagtctgttactagcagtcaagttaattagaaaataactgacaggcaactgtgttagtctgttacaagcagtcaaactcaacaactaagacatcttcacccattttgtgatcagtttttgacataccttaatgttaagtctgattacatattattaataatattcatttttgcatttaaagaaaacaaatcaacacccgtttttgaccaaaacctttcaccaccatagcaatgaaaaaagtatactaaaatttagtgccactagcaaagtaaaggagggtacgttgaanaggtacaacaaaattacaaatttacaatgaagtaagtaatttatcctct

SEQ ID NO: 300915 - DNA, 443 bp, Glycine max
acaacagatcttaattaggaccatttcgatgaaattgactcattacaactatgactttaacaatgatgattataaaaggtgcatgcatgttatgttgcatgtgaatctagtttaagaccatgcaataatgcaaacaagtatacatttcaactaaaatgctaccatgaaatgtttataagccaattaagaaaatgcaagctcaccaattgcatcaacagtggtttttccattggaaaaccttccagaaggtccaccagggaagtcaatcccataaggcaagtaatcagccctagccaaagattggagctggttgttgttcccattatcaaccaaagaatcaccaaaaatgaagtagcatggaacttgtggcgcaccttgaacaccaccccacaagccaagagaaacaacaacaactatgagtgccaacatgcttattgtgagat

SEQ ID NO: 300916 - DNA, 398 bp, Glycine max
  unsure (1)..(398): unsure at all n locations
agctttgttgctgaaaaattatataacagcaccaaggttctagtttagccctctcctctcttctctctcccctattttcgttttctagttttaggctttttctttgagacattttttcgttttgcaattccagcaacaataaaatttcgttcttcaatttataagttcgttatctattgattaatggaaggctaagtccccagcgttgctttctcttgaggatcaagcgcggntctctttgagttctattattactgttaaattctgttcagtttttcctcttcactaattactctaaatttggtgctattaattcatgcatgcttagtgcttgattaattgtctctgcgcttaatttacgttcatgcttaatgatcgtttatgagtaattggtgtat

SEQ ID NO: 300917 - DNA, 443 bp, Glycine max
gagaagctagagcttagctacacacacccctctcataactaagctcacctccttgagaagcttccttaagaagattcgtaaagaagctagagcttagctacacatacctctctaatagctaagctcacctccttgagatgagaagctagagcttagctacacaccccctataatagctaagctcacccccatgacaaaaaacatgaaaataaaaaaaagtccttattacaaagacaactcaaaatgccccgaaatacaaggctaaaaccctatactactagaatggccaaaatacaaggcctagatgaaggaaaaacctattctaatatttacaaagataagcgggctcatacttagcccatgggctcgaaatctaccctaaggctcatgagaaccctagggcctttccttggatctctagcccaatctacttggagtcttct

SEQ ID NO: 300918 - DNA, 387 bp, Glycine max
  unsure (1)..(387): unsure at all n locations
ttgcttcttgcgtagccgctcttggtgctcagaaaatcccaaaaacaaatccctcttattactagctattttgaattctttagttcctgaatgtacaaccttcaaattgttgcttgttcccctctttctgttctgcaaaaaagaaaatcaaatgttgtcaaaacattgatgaagtcctaagaaaatcaatatcaaagaaaacatggatgaaatcacaattaaaaagcacaactacctatctttcaaagtcctttggttaatttgttttgtcttcttatgtggcggggctttgtttaataatcttatacttttgccttccaaaacaaactaatcactaatcctctnttcattaatccaattctgtatgtcattgtataaaagatcatg

SEQ ID NO: 300919 - DNA, 540 bp, Glycine max
  unsure (1)..(540): unsure at all n locations
tccctcttattactagctattttgaattctttagttcctaaatgtacaaccttcaaattgttgcttgttcccctctttggtttgtgcagagtagaaaatcaatatcaaagaaaacatggagagaattgtcatggttattattactcgaacctgaaggaataacatctaaacaagtcattttatncttagaaggggaaaactctgcatatttatggaaaacatggggtatggaggcaagtaagcatgtgaataccacaagtcattttctccaattcaagggcttgattaattgctctaggaaaaaagcatacatctggtatattgtttggtttgcagctgtttggagcatttggcagaacagaaatttcggtttacgttgggttgaccatgttcactggttaacctattgtcacttatactcttatntatgcttgaagataacacctatcagtagatgctcatattagtccttgagatagtaagtattaataattgctntagcttctgactttgtacatgctttttagttgatactaatat

SEQ ID NO: 300920 - DNA, 265 bp, Glycine max
  unsure (1)..(265): unsure at all n locations
agcttcaatgttaatgncacatcacataacggcaaaaaccatatcacattatggacatcttgcgatggtattgtaagcgacatccttggccagagtgggtctgattgggatggcactaaccacatgatcaccagcgagaatgaaaatgcttggaatgaatattgcattgcaattcttctttaatatattgctatctgctattcaaagcacactgcatcagactgtctctttttctttctactcgcatccctcacctaaactgttt

SEQ ID NO: 300921 - DNA, 527 bp, Glycine max
  unsure (1)..(527): unsure at all n locations
aataaagcaagttattgacacagcttctccccaaaaatacttaggcaatttcctgccttttaacatgcttctcaccatgttcatgatagttctgttccttctttcagccaccccattgtgttggggtgtataaggagtaggtacttcatgaagcatcccttcatcacaattatttttgaaagtcatgtgaagtatattcagctccacatctgtccttatcaccttaattacctttccactttgtttttcacacatcaatttagacttcttaaaaacaaacaacacttcactctttctttntaatagataaatctacatcatccttgtatgttcatcaatgaaggatacgaagtacctgttacctccaagagactggatctcanagggtccacacacatcttatttgatagtgagagtgagagagacattntagagagaanaactgatatcatttcattctaaaaagttagttacaaagaggtatatatagacctctaaacctctgaactaagcanacagaaacaacc

SEQ ID NO: 300922 - DNA, 394 bp, Glycine max
agctttccaaactggtctgtttaaagttacaacattgcaagcagttgaaatatttccctgagctccctttgcggattggcttcgtaactgattcatcgtattgttcactaagagaagcaggattatacatttttaacagtataaatatattcattaattacatatttaaatgtttttattttaaattttatttttataaaattaaaatttagtatgtgcaatgcatggactaaaatgatagtttctatgcaatctctattaaattaaatcataaaacaatttggaccagtaattattattacattaaattaattagtaagtatttgccaatttttaattaaaggtatattcatttttttttctacacggcttattcaattcgaattctaaaaat

SEQ ID NO: 300923 - DNA, 497 bp, Glycine max
ttaagaatgatttgttagataattatgtttataatattgtcttttaggacttgtgtttgaattactttgggttatatttaaatgttttgatgatttaagagtgaatttttaatttagctgcagtattttttttaaaacaatacttccttcactactacaaaagaggttcaaagacggttataacaccctttccatgacggttttgaaccgtctttgaaatcactgtcgtggcaaataaacacttttcacgatgatttttaaatcgtcttagaatcttgaattttatattagttttcatagaaaccatttttgaatgtctttttttaatttcctttacaaatgtaaaaaaaataaaggatttgaagacagttgtctaaaaaattgtcttagaaagtcactttctaggataattctctagagaaccgtcttagaaagtacagtttttaagatggttatttggacaaccgtatagaaactctactttataagaagagttt

SEQ ID NO: 300924 - DNA, 379 bp, Glycine max
  unsure (1)..(379): unsure at all n locations
ttgcttcgatttcgtgatgaggactccaagaacatacttcatattgcatggaaatagcatagccacttgacgaaaaaaggggtcgcacttctaattctttatgtttaggtgagttgagagagtgagtgaccagtgcggcgtggaccaaagatcatggagttttattgtccaacggattataagattttgcacatctaatgggtattaagggattttatgacaataagctaattaacatacgtaatcatgtacgttacctacatcaccatgtaatctanatcaatcatgcacaatgttaatttacacagcgtgaatttatattgcctaatccttcatagcgcacaaattaaattctaatgaaacttacactctactaact

SEQ ID NO: 300925 - DNA, 531 bp, Glycine max
  unsure (1)..(531): unsure at all n locations
agaggggggagcacgacattgaaggaagaaaaaaagggagagaagttgaactttgagttgtgtctcccaagactctcattcatcaaagttaccacaagtgttacacatgcttctatttatagactaggtagcttccttgagaagttttcttgagaaaacttccttgagaagcttctttgagaaaacttccttgagaagctagagcttagctacacacacccctctcataactaagctcacctccttgagaagcttccttaagaagattcctaaagaagctagagcttagctacacatacctctctaatagctaagctcacctccttgagatgagaagctagaacttagctacacaccccctataatagctaagctcacccctatgacaaagaacatgaaaatacanacaaagtccttactacaaagactactcanaatgccccgaatacaaggctaagaccctatactactagatggccacatacaaggcccaatccaattcgctttctttttcgancacgagcagtgacc

SEQ ID NO: 300926 - DNA, 404 bp, Glycine max
ttgctttatttatgaattattggtagaaagagggcattcacttgtcagaaatgagagtgaaaaagggaaggagaaagtctggaataaggtagaattgagtggatattggattacgtgagagaaaacgggtccttgaagaacatgtttcatttggatttacctcgtgtttttttcccagatcagagaatgaggcttgcataatttagtgtgcatcagatacattttaccaaattatggagtgtcttaaaaatagtatattagaatgtatcgttagcatttctcttactgttttaaccaggaacagcaatacacctttagctatttctcttactgttttaaccaggaacagcaatacacctttagcgataatattattcttctgctctaaggacaaaaataattat

SEQ ID NO: 300927 - DNA, 555 bp, Glycine max
  unsure (1)..(555): unsure at all n locations
catcttcctttgatcaaggtgtcaaaatgagaaagatagctaagaacgtggttgatatcgaggcttccaaggaaccttagaacttcatcatcaagccatcactccaagcacaaccctattcggcgtcgaggaaagaatcatccacttaaggaaggatttccccttattaccttggaagggaaacacttggggtaaaaggcgaggtagggcctatttgttggggaataaatgtgtatgcccaagatctaatccatcatgttatcaattttagtaaaatattgttctttattttattatcatatttattgatttattaaattgtcaatttgacaagactttgattaaaattagagacttgctatcatgataaagattatgataatgaacaacaagtcctttataattntaatctaaattggttttactcatacgaatattgtgaatacgacatcaataattcggcataatcaatatatatatatatatatatatatatatatatatatatatatatatatatggcaggggctttattggatacaacatagtagatcc

SEQ ID NO: 300928 - DNA, 389 bp, Glycine max
  unsure (1)..(389): unsure at all n locations
tagcttctagccaaatggacttaccttgaattaattcctttgatagcccttttgagccttggtttcctttccttgttntgaagctcactacaagccttaagtgaaaaaccatgatattaccatatccttaaggaattttggagctttggaattgttttgggaataagtgtggggggtttttgtttcattggacaacttgttttgttggctatgcttcatgatgtattttgggccatacttgatgtacattgtatattggttaaatgttggacatgctgaatgaaatgttgtttctcacaggcaaaaaaaaaaaaaaaaaaaaaaaaaaaattcgaacaaaaaaaaaacaaaaaaaaaagcaataaagttgagtgaataagatctttaat

SEQ ID NO: 300929 - DNA, 486 bp, Glycine max
  unsure (1)..(486): unsure at all n locations
gagacatttttttttaatcctcccccaaattaggagcatatcataactaagatctttatgctctcttaaaccctagaaaaaggtaggagataattaaagtaggcttaagggttttacaaaaaaacacgattaccatttttggctcaaataaggagcaagggataaactattatcaaaggttggctntttggctaagtggctaaaataaaaagaaacatggccttgatcatatccaccttatgcaaataatctaacagtctaagaatgatacaaaattaggaatntaaaaacaaacgttctctcataattaagttcacacagctcaccgggacaagataaagttattggcttaccggaccatgatctctttccatcaagctaaccttttctctctttgtgattcatgttccactggttgactgactcttgcttccaagaaaccagtattttcacaattgggtatgcagcattcaagtgttgaatcct

SEQ ID NO: 300930 - DNA, 375 bp, Glycine max
  unsure (1)..(375): unsure at all n locations
tagctttctcggggccattcctgcgaaggcaaacatttggaaagttagttcttaccaacaaatgctacccttanaacaaaaatggcatacacaccccttcaataaatacaaacatcaatgtaaatttagagcaagcttatgcgcatacttcttcacgaacgttcacttgcacaagacattcttataactaagacaaatgcacccatatacaatcaaggcaccttcgttacctagattatntacatgtacnttccaggtgtatctggtacctacatcacacacatttnctttgcctaattcacatacatgcatactctaagcacttttgctataaaaaatgcatacgtgcacatctttgtatttctaataactata

SEQ ID NO: 300931 - DNA, 497 bp, Glycine max
  unsure (1)..(497): unsure at all n locations
acggcccaataagcacggtgctcaatctccactggaaggtggcatgccttaccaaaaaccatcctataaggagaaatcctcaaaggtgtttggtaagcggtcctgtgagcccatagagcatcttcaagtagctttctctaatcctttatgttgggttgcactaccttttgcaacacttgcttgatctctctttgtgctgctggggcatctcatgcctatatgcaatagtccctttcgctctctaaaattgctcacaagtggtagaaaaatgatgagcatctctaaaaatggtgggccaatagaacccacaatccaataccttcttagtggtctactgaggaccaaaatgactgcgggtaggtgtgccatgacaaaactganaaatagattgaatctcatgatttggcacacatctgcggatcacttggtcactaccaaaccttgaaaaataaggatcatcccacacataatctttagcatcactcttaagnttatct

SEQ ID NO: 300932 - DNA, 272 bp, Glycine max
agcttggctcccttgttgcctacgcgagctaggatgctatctctaaaagctaccgccttctggatgaacatcctgtaaggcccaagtagcccacgctgctattggcaccccctatgtactaaatacacgcctaccttaattgatgattgtttttatgacctgatgtattcacatggtacgtgcaagatgcgttaagagcataccacttatcgaaaaggggatggtagatcttatcgggagttattacagccatcctgtcggcgatgatggac

SEQ ID NO: 300933 - DNA, 334 bp, Glycine max
aatcatccaaatatcgagaaggacaagtcctccataacaataacagcatgtccctcccttgcacaatgctgctggtcctagcaagccatatgttcctgctccaatgcatcaccgactgagacaacacgctgctgaagcccctccttaaccttacttagaagagtcagtgaggcaaatgttcatccagaatatgagatctcaacagcagacaagagcctgcattcagagtctgacaaatcagatggcgcagatggctactcactcaaaccaagctgagtcccaaaattctgacaaactgccttcacaaactatgcagaatctgaagaatgtgagt

SEQ ID NO: 300934 - DNA, 402 bp, Glycine max
  unsure (1)..(402): unsure at all n locations
agcttgttgtttatgcagacacgttaccatcatgttgcggngttggtttcattgcaacaccgttttgtttctgagcccgaggttcaagggcccaaggttgcgtttctcttcattgcacggaacaggctccctttggaaatggtttgngatgctttctttagggtactttcttttctcttttagttgttattgatctctatatctttgggattagtagtgtatgcaaatgacaatataaagagtttttacgctgttatccaatcataatccatatgataagtttgttgacttttacaatggttagtttaccaacaatggtttctaattgattgatattgtaaatattttctacatttatagtgcgtaaaattaaactcaaatatgcttgcttgtgtgtgtgtg

SEQ ID NO: 300935 - DNA, 526 bp, Glycine max
  unsure (1)..(526): unsure at all n locations
actagatttttaccaataaccatttgtattttggtgttattaaaagagtataatggtccatcagattcgaattttgaactcttttccaccaatatgattattttatcaagactatcgtatctttaaaaaatccttatttttttttttgttcaaaacttactagacatgcaatgaaaagttggatcgggccgatgcagccacggttgaatacacgatccaacacagaacaacttgccacttgctccccctcacgacgcttaaccatggtcaacaattcatgttcaagtccctaaccatggtcacacgcccaacctaacccaaccctttcatttcccttcaaaattaatacacaccttctgaatcctataaataacccactttcattcattgtagtttccctcttcttccttctctttcgttcctcctttttttcacttttcgccccctttacgaagcgcgccgttagtctctgcgacccgaaatccngaacccgaattggttcaatctccgagagagagagagagag

SEQ ID NO: 300936 - DNA, 406 bp, Glycine max
agctttggttttgttgactcgctccaatggctcatcatgtcttctattgaacctttcttcatacgctcgaagagaacccatcaattggtctacggtcattgagtctaaatccttagactcttcaatagcacaaaccacataatcaaatttagcgattaaggagcgaaggatcttttccaccacacgaacatcttccatattttctccataacgcttcatttggttcacaatagccaacaccttgttgccaaaatctgagatagattcagattccttcatatgcaatgattcaaactctctacgtagagtttgtacgcgcaccttttttaccttatcaacaccttcaagggaggttttcacaatctcccatgcttctttggatgtggttgcatttgacaccaactcc

SEQ ID NO: 300937 - DNA, 500 bp, Glycine max
  unsure (1)..(500): unsure at all n locations
tttttgtttgtaaggattgtttgaatgaattggaaaagtgttcaagattggaatgattgatttcaaaatgcaaaacaaagccttgcttttatagactcttcatgtctggtcaagaaagccattcagaagagttatatcttttagaaaagcttaaaaaccatttgaaagagtcaaaacctttttgaagagttacatctttagatttttcaaaaacaaacactggtaatcgattaccaaatatgtgtaatcgattacacaaagcttttgaatgaaacaatgtgactcttcacatttaaatttgaatttgaacgttcaagggcaatggtaatcgattaccataacattgtaatcgattacagcctttagaaaatatttggaacgttgtaaattcagttggaaaacantttcaaactcattntgctactggtanatcgatacaacaatatggtaatcgattactagagagtaaaactctntggtaagggtttgtcaaaactcat

SEQ ID NO: 300938 - DNA, 405 bp, Glycine max
  unsure (1)..(405): unsure at all n locations
agcttgttatttagttnttgatgcagcaagtgagggaaaacaattcttaattgttggtacaaaaaaaaaagcagcggattcagtagcacgggcttgaataagagctcggtgtcattatgttaataaaaagtggctcggcggtatgttaacgaattggtatactacagaaacacgacttcaaaagttcagggacttgagaatgcaacaaaagacggngagactcaatagttttccaaaaagagatgccgctatattgaagagacatttagctcatttggaaacatatcttggcggcattaaatatatgacggngttacctgatattgtaataatcgtcgatcaacaagaagaatatacggctcttcgagaatgtataactntggaaattccaacaatttgtttaat

SEQ ID NO: 300939 - DNA, 475 bp, Glycine max
  unsure (1)..(475): unsure at all n locations
gatggatcttatatatctatatatctatagatagatatatagatatagatatatagatatagatcatacaatgaagtaccgcacgagtgggtatataggaatccaaatctgccgaatcactcatgttatgatcttctacatcctaggtcttcccgttccttcatctggcttatgttcttcatgtagcattcagactgaatgactctatgaaattacgtcgctacttccacatggtacgggtaacgtaggagacatctctatttttcccggggggaatccttagaattaccacagcttagctntcaattcgcctctgaccatcaaatgaaatgtgaataacccgtcctcccctctntgaaactntgaaacaaagggtgcttccggttctgtcggtgcttgaaacaattntagtcttctcatattactatatctcgagagtcacataatttatatgaggaactactgaactcaatca

SEQ ID NO: 300940 - DNA, 406 bp, Glycine max
  unsure (1)..(406): unsure at all n locations
agctttctcgtacctcaatcagcaatactgcaactgaagacgtattattattattatcatcaataaaacatgaacacccacgaaaacatagcatacacgaagttgacctacgtacctcgcggagaaagctntgagctntgagcacccacgagtgtttcagcaccctagtaccaagagtgtatgtaaagtttcttcgagccacactttcaagagcagtgtagggggttctgtaggttcgagcgaggggtttccggcagtattgaaaacaatgtgggacaatgtgggtgtcgagggagcggtttctggcagatttcaggcgggaggagaaagagaacagcgactgcaaggttttcgagcgcacgggttgtgaaatgccaatgttntaacttataaacataacaacatc

SEQ ID NO: 300941 - DNA, 522 bp, Glycine max
  unsure (1)..(522): unsure at all n locations
acgtcatggaagcgttacgaaagcgtctcggcttggattttttccttctttcgtcttttcctcactaattntaagtgaattatgagtgccaaagatgcttaaccttttttcctcagccccttacaccattttatagcaaaaatgagggaggtggttgccgcctagctcgcccaggcgagctaggtagcttccgcctgaagtaacccttctccaaaatattccagatgggcccagggctaggtacaccccccaaattgattagttcaccccttattttttgtttttggctgatttcctttcgaaacatcgcgaaactttatggattacgcgacgatgagtgttaagcatctcaacttggtcagcaaaggtccgcatgttgacaaaaaattgtcccctgatgaaattagggtatgacagttgcccctctnntacttatgtttattggagataaaagggaagtaaaggtaagacactaatttcgttcgagcttgaaactcacccgaccgaccaatagctcaatca

SEQ ID NO: 300942 - DNA, 402 bp, Glycine max
  unsure (1)..(402): unsure at all n locations
ttgcttgaagacttgtacatgaccaaatctctggtaaattgattcttgatcttgaaaacattgttgttattattgaggatgaagatcaagccttactgttattgtgtgatctacttaagacctttgctcatttcaaagaaacacttctctatggaagagattctctcactcttgttgaagtccaatcagccttgaactctaagggattaaatgaaagaaatgaacaaagaccttctgtacacggngagagactcagctcgtggaagacaatataagaaggatgataaggcagaagggaaaagatccaagtcacaagctcgatctggatctaatgtaccaaacattagatgttaccactataaaagagaaggccatactcggagattntgtcctgatagacac

SEQ ID NO: 300943 - DNA, 525 bp, Glycine max
  unsure (1)..(525): unsure at all n locations
gatgatcgtgcaaaatggatagaattaaatgatttaataaaagttggtgcagtgggaagcaaaattttagtgacaacacggagtgactcaattgcttcaatggtgggcactgtaccctcttatgttttagaaggtctgtctgtggagaattgtttgtctctgtttgttaaatgggcattcaaggaaggtgaagaaaaaaaatacccaaatctagtggatataggaaaagaaatggtgaaaaaatgccaaggggttccactagctgttcgaactttaggaagttctctgttcttgaattttgatttagaaagatgggaatttgtaagagaccatgagatctggaacttaaaccaaaagaaagatgacattntacctgcccttaagttgagctatgatcaaatgccatcttatttgangcagtgttctgcttatttttccctctttttccaaggatttggccacattggttctcantttgtgagtctttgcngatcatttggattacttcgatcntcctctggaagt

SEQ ID NO: 300944 - DNA, 400 bp, Glycine max
  unsure (1)..(400): unsure at all n locations
ttgcttttgtttcagagttgcttttgaagatggcaagcaagaagacactctgcccaaagtgggtcaaggtcacttgatgattttcagtgagcccataaaaatatctaagttctgtccaaccaactagtagagttgagctcaccagatcttggttgtatgtaatagagtgcatgttgctactattgtctagtagatgacaagtatgctctanttcagccttccatcttatagcaaatgacctactgacttcaccataacgatacatttaacaaacaaagtaatataagcaaatgtgttatatcatgtcatgtttatttgagaataatcttgaaatttctaaattgatacattacatgaacaacattgaacatttcctctgttttttttttgctaatcttca

SEQ ID NO: 300945 - DNA, 510 bp, Glycine max
  unsure (1)..(510): unsure at all n locations
gaaacttctcagctgcttgatattgagtggtgtaggccactctagaactgtctgcaccttagtagcatccatagcaactccttcacctgaaactatatgtcctaagtactctatctccaatacaccaaaagagcatttagacaacttagtaaacaaaacattttctttcaacactttcaatacagcctcaagatggcataagtgttcatgccatgtggaactatataccaatatatcatcaaaaaacactaacacatatttccttaaagcatgttggaaaatatggttcatcaaacactgaaaagaagtcggagcattggttaaaccaaatggcattaccaaccactcataatggccatggtgagttcaaaaggctggtttatgtctatcctcacgttggactagtatctggtgatagcccgaccttatatccagtntagaacaatactttgcaccaaatagttcatctaacagcttggtcatagtaggcacagggaaactatcttttac

SEQ ID NO: 300946 - DNA, 404 bp, Glycine max
ttgctcaacattcaatgtcaagcgtctcgatatattatgggactcaatcagacatccgagtaaaaagttattgtcgtttgaattggctcggagcttcaacattcaatttcgagggtctcgatatattaccggactcaatccgacatccgagaaaaaaattattgtcgtttgaattggctcacaggttcaacattcaattttgagcgtctcgatatgttacgggactcaatcagacatcccagtaaaaagctattgtcatttgaatttgctcacagattcaacattcaatttcgagggtctcgatatattacgggactcaatcagacattcgagtaaatagttattgtcgtttgaattggctcacaggttcaacattcaatttcgagcgtctcgttatattaccg

SEQ ID NO: 300947 - DNA, 464 bp, Glycine max
  unsure (1)..(464): unsure at all n locations
gattgagtcccgtaacatatcgagacgctcgaaattgaatgttgaagctctcagccaattcaaacgacaataactttttactcggatgtctgattgagcctcgtaatataacgagacgctcgaaattgaatgttgaagctctgagccaattcaaacgacaacaactttttactgggatgtctgattgagtctcgtaatatatcgagaggctcaaaattgaatgttgaagctctgagacaattcaaacgacaatagctttttactcggatgtctgattgagtctcgtaacatatcgagacgctcgaaattgaatgttgaagctctgagccaattcaaacgacaataactntttactcggatgtctgattgagtcccgtaacatatcgagacgctcgaaattgaatgttgaagctctcagccaattcanacgacaataactntntactcggatgtctgattgagtc

SEQ ID NO: 300948 - DNA, 347 bp, Glycine max
ggtttgtttcttatgttggatatttttttcttctcattgttgttttaagtgcaattcatatatagttgacgcattaaataaaaatctaagtttgattaaaaatcattattttctatcaatatatgtcattttttttagtattgctcgcgtgcatagaaggctcaattttatgcttatccagtcgtctgctttcaaccatcaagtacaaacattttgaatccatttgtatgtttacgtccaaaacatcattttactctagttaaacaatggatgctttttccattttccctttctctttcgttatcattattagctaggtttggttgccagctgattattgcttctat

SEQ ID NO: 300949 - DNA, 451 bp, Glycine max
  unsure (1)..(451): unsure at all n locations
aacacgcacacacacgtctgtgttttcttgatcttaaagattgtagtaacaagtgttttaggccaattgtaggttttaactaaattattcttcgcaattgatgatgtaaatatgaactggaatcagcaagttggtcattttacactatttcacacgaatggaatggaagcatacaaatgtgttaaatttaaatattgatcagctgacaatttttatataacccatattcatagcaaatactaaaagtcagactaaagaagttagtactcagtagacattctattaagcaaaaaataatcactggccaaaattaataacattaactaccatgcactnttttgttcagggaatgatgaacagcagatagattggaaacagtgttgtggacaaagaannatntagcttttcaagatcatcagaaaaaagtacattcagactggatgtccttatc

SEQ ID NO: 300950 - DNA, 398 bp, Glycine max
  unsure (1)..(398): unsure at all n locations
ttgttagcttatattattctatgaaaagaatggtatcttccacaacttctcatcactgagaacacctacacanaatggngtagttgaaaggaaaaatagaactttgcaagaaatggtaggaccatgctttgcacaatctcactaactaaaaacttttgggcagcaacaataaacacaacttgctatgttcaaaatagaatatggtaagacattgattaaaaagactccttatgaactgtggatggaagatgacctaacatttcatactttcatccatttggatgtaagtgttttatccttaatccaagaaatgaactcgcaaagtttggtttagaggtggataaaggtatcttcctaggatattctgacatatctaaagctttcagagtggttaactc

SEQ ID NO: 300951 - DNA, 422 bp, Glycine max
  unsure (1)..(422): unsure at all n locations
gggcagcaatactactaacttgactgtagtgtgcttgtatgtagatgacttgcttgtgacacgaaataatgagactgagattgccaactntaaaggagagatgataagagagttcgaaatgactgatttggaccttatttcttattttcttggaattgaattcaagagaactaatgggggagtgatcatgaatcaagggaggtatgaaagagatgtactgaagaagttcagaatggttgactgcaattntgcagacacacccactgccactggtgtgaacttggtgaaagatcctaatgaagaagaagtagatgtaacattgtatagacaaatggtgggctcactgaggtatctntgttgtactagacctaacttattgtatgttgntggcttaattagtagatatatggagaatcttgaac

SEQ ID NO: 300952 - DNA, 79 bp, Glycine max
tttttgctttagaagttcttgatagtacaaatgcgctccaccaccgcggtgcatccaacaccactgtggggaggggact

SEQ ID NO: 300953 - DNA, 60 bp, Glycine max
cattcttgctctttgttggctaacagacacaactcgctacaactcaaggaaagggaatcc

SEQ ID NO: 300954 - DNA, 70 bp, Glycine max
agcttctttctgcgtcggcgaagagtagtaggagcgattctgagaggaggatcgacacacccacgcgaga

SEQ ID NO: 300955 - DNA, 120 bp, Glycine max
  unsure (1)..(120): unsure at all n locations
ccccttacaaataatttagccatgccattcttttctaaactgagctgngaaatattaaaatggtggtatactctttcttacagccaaccttccttattaacatgctaatataattaacct

SEQ ID NO: 300956 - DNA, 366 bp, Glycine max
  unsure (1)..(366): unsure at all n locations
ctatgaaagcttgattcgtttatacaggacccanactagacgcnaggagaanaacagaacagaaacaccaccacccacacaagnacacaaacggcaaaaacacacccaccacccaaccgcgccccaccccccccgcaccccccccccacacaaccaccccccccacccacaccccgcccccccccccaccacaacccccccccccccccgcgcacccccccccaccccccaccccccgccccccacccaccccnccccacccaccccncccccccccccacaccccccccccaccccccacccccaccccccccacacccccacaccccccgccacccccccccccccccaccccccgcccccccc

SEQ ID NO: 300957 - DNA, 148 bp, Glycine max
acggcctattcgttggcgaataaatgtgtatgcccaagatctaattcatcatgctttcaattttactaacatatttgtctttattttattatcatatttattgacttatttaatccgtcatatcgacacgactttgattaatattaca

SEQ ID NO: 300958 - DNA, 197 bp, Glycine max
tgctttggtgcggcgaaaagattgtgaaggtgaaaagacaactataatgaccagacatacggaaatgaagagactcgtagtgcaagtgctttgatgcgttccaaactgaaaagtcaaataagtagtggtgttggccattcgagtttcaatattgttgttcgttggttctaaccatgcctaatacagatattcaacta

SEQ ID NO: 300959 - DNA, 403 bp, Glycine max
  unsure (1)..(403): unsure at all n locations
taaacttgctttctatttatttgcacatgttttgaaaatggttctttatttgatttaactaatccttgaatttgcctattgaagatagcagtactttctacaggtaatctttctacttatgaatggcaaattaattaaccctctcttaacatcaattacccattgtatatacataatttttattactcattattagctcttacttaatttaatattatataagtatatttattcattattagtaatatagataatttttattactcattgctaggctctaattaattaattaatattttattatatttattgattattaaaaatataaataattnttaccactcattctcagtttttatatataaacaattattacatcaagcatattgattaattactatgc

SEQ ID NO: 300960 - DNA, 63 bp, Glycine max
  unsure (1)..(63): unsure at all n locations
tgcttgngcttcaagtttccatacataggcggagaggtgaagtgatcaaggtatcagacactg

SEQ ID NO: 300961 - DNA, 231 bp, Glycine max
tcaccaataacaatgcacagattcaccagtaatggaacgcttcagaagataaaaaggtatatgtcgatgccctaagtactggatgaaatggactatgtatctcacgatctcagggatgcctgtcagatggatagcctctaaccataccctacattgagcatgcacacaactagatgcgttatcatgtacatacacgcgcacgtatgaatacatgtaccctcacatgatatc

SEQ ID NO: 300962 - DNA, 153 bp, Glycine max
aactgacttcgcactgcctctctcaagtttcaagctccttaccctgttttgctcaataagccacctgattacacctttttgaggaactctggatgctctcgctatccttttcttagaccctataacaaacacaaccttgagtttagcccccat

SEQ ID NO: 300963 - DNA, 201 bp, Glycine max
  unsure (1)..(201): unsure at all n locations
gacccccccnaccccaacaccgccacgcccacgggccccccccccccggcacaacgcacgccangcccccggcccgcacccacagcaccccccccaccccacgccccacccccccaaccccccacacccgcgccccccccccgccgccccccacccccgacgcccccgcccgcccgcgagcgccgccgccccccccccccc

SEQ ID NO: 300964 - DNA, 233 bp, Glycine max
cagattagcatgaacctaatttccatattgcctagaaatttgaacaactattggccatcaacaccacagaccataacgataaaagcctttgacaattaaaaaaaatacaaaaataaaatacaaagcagcagcaacttagcatgtagtataacataagcttgacaaataaaaatacactatggaatacaactatttccaaatactgaacaattatcaagattaacctgaatcta

SEQ ID NO: 300965 - DNA, 469 bp, Glycine max
  unsure (1)..(469): unsure at all n locations
aggaatcanactcatgactaggaacccacgtttgctttatgagctagaaaaacatgcactctgcgatcgctatgcagacgacttgatcagagtaaacatgaacatacatttctcatatcctttgaaggtccaaccatctctttttttcacttcatatctaaactgactactcgcgcctacacatctatccttgccctgcctccatacgcctacataggatcatgtattctgtaatttatgactaatcatgattctctgtgatcttgctctctaagtaatcctaacttactggatacaaaactattaagcagacatatttattatccctataattcttattgtttgccgtcaacactcacattaatgttagagaaccctcctaggagccttatcctgcgaaactattcgacaacgacgcacccttccaaattgtagcttgcaccttctaattactacggtacacgccccg

SEQ ID NO: 300966 - DNA, 65 bp, Glycine max
agctgcaccgggatccttagagcgacctgaggatgtagtttatatgaaagaatgattcacgcaaa

SEQ ID NO: 300967 - DNA, 116 bp, Glycine max
aagacatattggattggagatcatgtttggaacaatctgctatcacattggaatgcacctaagtatcgtttcaagtgtgcatgagcaaaaaaacacaacatcaagcatctgaacag

SEQ ID NO: 300968 - DNA, 375 bp, Glycine max
atcatcggcatgagattggagagaatcagaggtaaagaattggaaacagataaatgttgggagcttcaacttctaaactgtgaatttctgttacaaccttacacagattcagttgtttaccttacagttggacaggtgggattaacgacaatgttaacacgtgcaattatggtgtttcagttcttcatgtaaaaataataacactgcagtggacatcaatgtcgttctcaattaaaatgccctttttcataggaacatgttggtccattttctacctattagaaatcatcttgtatataacttttaaagtcatcattataaaatatgaataatattctcttaacaaaataatattctcctacaagataatatata

SEQ ID NO: 300969 - DNA, 143 bp, Glycine max
agcttatactttattataatctatagtgtcgaactgtgttttaatcactacgaggcccaattccatatttatcgttttatttaatcaaaaaactaaaattctcattttacaaacacacattacaaatttaatcgataaacata

SEQ ID NO: 300970 - DNA, 431 bp, Glycine max
gctcctatgaggttatcttgacttctaagcctttctcttatttgatcgttttcctcttagtgcctcttgtatgttgggaactgtcgcaacctacccttttgcgggcgagtgacgcgaggctcacgggtgtgtcttccatgggaggaaaatgtgcggagtcgccaccaacgtttattgaaaggaaaacattggaaaaaccaaaggaaactggtcataaagaatattccagattcaggagttatgcttacgcttgaggaaggtattagcacctctcacgtttgtcccaaaggacaacagccttagatttagagctgcgtgaaatcatgtatcctacattctccgtctctatatattcttgaggtccacaaaagcgggatttttgctcctacgtatcctccatcagagaggaaatcacacctacgtagttcttt

SEQ ID NO: 300971 - DNA, 276 bp, Glycine max
agcttcttgttgtcggtaagatatgccccatagtcaatagtgcatgggttactcccttgcgagtggtatcacagaaatggggtacacagattatcactaatgaccagaatgagttgattcccacaataactatgaccggatgaagaatgcgcattgattatcgtaagctaattaaagctacacaaacatatcattcttctcttactttcatggataaaatgttggaacgccttatgggataagcctattatactttccttgatggttattcccgat

SEQ ID NO: 300972 - DNA, 485 bp, Glycine max
  unsure (1)..(485): unsure at all n locations
ccgcggtttgagcgttgataacgtgcctacgagaactgacgctaatngcgcaggataattgatagttatgctcttcattatgagtgcgctctatgactaaccaaacacagtatatgaactagtcatggcttactatngtactctctatcggataccggacgataatactataattatcatgaagactttctttcgacatggactatagcgtttttatgatctagtcattatgcacagtcgtgcctatcattgtgactaagactagagtagagattgcgcactatacatcgcacaaattctgcacatacgattgctaaacattcaataattatcacatgaatgaaaattgcacaattgaaatactatatgatccgactttacataatgataatagtatgcaagatgcaagattgaagaacgtgtatgacaactcgtgtgcaagaatgctattactctataatcatacaggcgaaattatacgatgg

SEQ ID NO: 300973 - DNA, 268 bp, Glycine max
  unsure (1)..(268): unsure at all n locations
agtttgtattttggttcaagcctacatgaggntcaatactttggttttgggaaaagctacttattgctgaaaatcaatacaacttggtcaacactcntcccactcaatctcatacatgaaccacagacaactttttccgatcttattttgctactatattctctgatttgaaatatgtttatcatgttgtccactattctggcgttataaattcatctgtctctactaaacaccatatcatgtctcaccctcttcgcatcattaaatg

SEQ ID NO: 300974 - DNA, 307 bp, Glycine max
catctctggtttatgtggcttacatcaagacttttatcgggtgcttgtgtaagcacaggattactatttcacaccctctctaatgcgaattaccaatgagcatcaattctaacataccgtgtgccaatttttaagaacccccattgcacttgctcttacactcactcttatactctgtttataataaagttttactgataaaaaataccaacgtgacttagctcatttagactatacacccgaggatacactgagctctaagcccaattgtaaaaactaccaactggactaaatgcgatgctacgaa

SEQ ID NO: 300975 - DNA, 453 bp, Glycine max
  unsure (1)..(453): unsure at all n locations
cgccgagtgagtctgacatcaagtcattggatctcgcaccngcggattctctanagtctacatgcaggcatgcacatttgtacttttaaacnatctctttcataggttgaggttgctcttagattgcctgtgcctgtacattattacatgctaacgctggatcacgaacttgccatcgacacactgattacaaatcaaatctcggtccttaaaatctagttaacaaccaaccattacatcttgcatacagtgcttaaacgccatcacttcgactacttatgcttttcaccagatcgtaccattctcgctatcatgactaaaaaattatggaaaatgaaccaattacgtaaacatatgcatggccatggctacagcgcgcactccacccatcctaagaccccttcgtacttacatccgttgactgcccgtacaactggtccaaaaacgaaaaac

SEQ ID NO: 300976 - DNA, 390 bp, Glycine max
gttcgggagacaaatgttaagcgttctcgatatgcgaagatgatattccgagtactttggatttggtacgaccatgctctcctgatttccagctgggaaattggcgagtggaggaacgccccggcatttacgcaacaagcataatgtaaacctttacggtttttaaaagctctatagttgggcctaggctttagagttttcattttgttaaggctttgtgtcttttgtttttgaatttataatacaaggatctttcttcatctgttcctggtctctacccattctcattcatttgcatgtttacttctttttctgaaacggcagatccgatgacgagtcccccgaggtactaatacctgggacccgtctatcgactttgagcacgaaatg

SEQ ID NO: 300977 - DNA, 170 bp, Glycine max
tgatactctaagtcagctgtcgcatgtagtttttgaagacacgatgatgtgctagcggtacccgcagagcttgaacgatctcattgagttaatgagaatttccattccatagccgtcatagtttgactggagtatgacgaacctctggacggtattatgggcaccactga

SEQ ID NO: 300978 - DNA, 424 bp, Glycine max
tagagaggaagctctcaatggaggaagataatgagagttagagagagagagaggcgtggaaattaaaggaggatagggagagaagttgaactttgaagtgtgtctcatagtttctcattcatcaaagttatgacaagtcgtacacatgtttctacttatagcctatgtcactaactaaatgaaattcactttgtgttttatttttatttcatgtaaatctaaaaggaatattccaagaatatgccaaaggcatcttaacatattccctttagatgacacaagcatggaaggtgtgactctagcacatgggaagcttccttgagaagcaaggaagatagcttccttgggaagcaaggaagacagcttccttaagaagctagagttagctacacatacccctccaatagctaagctaacccccatt

SEQ ID NO: 300979 - DNA, 209 bp, Glycine max
  unsure (1)..(209): unsure at all n locations
agcttgtagtcgattacttacatactgtaatcgattaccagaggagtttttcagaaaacattctcaacagtcacatctttctgtgtggttcttgaatggctatcataggcctatatatacgtgacttgagacacgaatntgacaagagttttgaacgaaaaaagtctcatcctcctaaaaagcaaaattgctttatcctcttacaaatt

SEQ ID NO: 300980 - DNA, 411 bp, Glycine max
  unsure (1)..(411): unsure at all n locations
atactccagcttgatctctttntcatttgtagtttacttatgaaacatgttgaagtttgtctctgttaaatctatagactgcttggagcaccaatagagattactagtgataaatctttagggaaatttgtaacatagattcaattatatgtaggactagggtcagatatagtcataaacaaattgtcttttggttctttggtagtagatcactgcttttggaatgtttttttttttgtcagcaaaaataatatatattgatatatgagggagtaccagaggtaccataaatacaagagtatgtaagtaaggctggtaaatcctcatatcaggctgaatacaaactgataggagcttactagcctactaacaagtggcanaaattacaaaaaccacagctggtgttaccct

SEQ ID NO: 300981 - DNA, 208 bp, Glycine max
tcaagcttcttatccaaggctcatcttgcgggcgaagctccttcttccatggcttactccctagtggatggcgcctcctctcacctcttctcctttgtcttctgctgcatctccatgatggcaaatcactattaaaggacctcattgaagctcaaagatccagcctccatacaagccccacaagcaagcttccatcatatacatatta

SEQ ID NO: 300982 - DNA, 463 bp, Glycine max
  unsure (1)..(463): unsure at all n locations
caccgcctgccatgaacctganttcgaattttcgaacnccntttgaaantcgcggtttaggagcttttataccttttatagcgcggttttggggagctcttgcgcgatcttcgagggttctttaactgacgtcctctgcagcactattctctagaaacttctcaggaagctacctcctctataactagaagcatgtgtaacacattgtgtacctcttgtgaatgacagcgttggacacacaactcaaagtctaacttcatctcccttttttttccttcctgctcccccactctattttctctacctctctcttttgctccattgaagcatnctctccatccttttattcacgactctcttggtggtgaatctccctctctcatggcctatttcttactggattgctccatctctcacctattttcctttgtttccgctgatatcaacgtggaaatcatcttgc

SEQ ID NO: 300983 - DNA, 431 bp, Glycine max
tatctaacattaaggtttatttaatttgtttgacaatttatgtaataactctatagactatagagtgtttgattaccgaaccttaactactactgaaaattatattacaacaacctaaatttgtaaacattatcttggttattttttatgaggacacatgtattttatacggaagaaaatattgtgagttacataaaaaattattattataagagataaaagtttctctttgaatatttagcatataaatgtacactcaaagctcaaatttggaatcacatatgaatttagactagtcatgagtaaattaatttatacattccatgttaaaacaaattatcatcataatatgaattatttaatttcatattataaatatattaaatactattgcacgacttacccttgaactaatttttacagattaaccg

SEQ ID NO: 300984 - DNA, 318 bp, Glycine max
  unsure (1)..(318): unsure at all n locations
agcttatgactggtcaagttcacatattcagaatgttttgaatatatttagttgtagtcttgcggatgaaagaagtatggttcaagaaatgacacaagaaacaatttttgcagtcctcctaagcaaccttagtcaattctttagttagagccgtgaattcaggaaaatatctagcaaaccagagttgaaggaaccaaaaagggttgccccccgaccaatgttttggcatgtattcattntggtaatcatgccaaaaagagaatcgtaaaaaggtgcaagacaatagggacctatggcaactctcttgccaaacatgtt

SEQ ID NO: 300985 - DNA, 415 bp, Glycine max
tatgctgcagacatttattatagttctactcaacagctatgcgcgcaacttcagagtaattatgacctttcaagcaatagatacaatccatgttggaggaatcatccaaatctgagatggacaagtcctgcacaacaacatcagcatgtccctcctttccagaatgttggaggtccaatcaagccatatgttcctcctccaatacagcaacagtgacaacaaagacaacatgcaactgaagctcctacttaacctttcttagaagagttagtgaggaaaatgaccattcaaaatatgcaatttcagcaatagacaacagcctccattcatagcttgacaaatcagatggagcagatggctacttagatgaaccaagctcagtcccaaaattctgacaaattgccttcataaactg

SEQ ID NO: 300986 - DNA, 142 bp, Glycine max
acaagcactgccgcagtggtacaagacagttaatgagtttatgagcgactcacgattcacaagatgtgacatggaccattgctgctatgttaaaaaatatactaatagttatgttatcccttgtgcgtatgctgatgacatg

SEQ ID NO: 300987 - DNA, 418 bp, Glycine max
  unsure (1)..(418): unsure at all n locations
tgggtgattttctttttctctgttatacaaatttatgttgtgtattgagaaacaaagttttagtctccattggaggtagatgtgggtttttagttgttgattttcaaacttaaatttgaaaacaaaaaatgtttgaataaaatgaggttgaaatggtttttaaataaattttaaaaccaacttagctcacttttgaaaacaagaaataaaagagttttgtagtttaagtttttggaagttgtgtggttttgatactttccttcacttttctccaccttccatcatatctttgtttcttgtttagtgtttgttagaggtgacaaaatagatgaggttaactaactcgacttgaacccatttgataaaatgtagggtttaaactatagactatgatcatgaatntaatttaagtttttta

SEQ ID NO: 300988 - DNA, 262 bp, Glycine max
agcttacgggagccaccctttggcagcagccccaagccttcattgtgcatttttgctttcatttttcgcattttctttcatctcctacaagtaagtaccatctcccttcaaattttggctttccattgtggtattctggtgctttagctctcatattctttctaaatttcatgacacaatttgcgtatgaatccatgctttgattatttgattgcgggctgcaacggatgaccctacgcctacctttgattctactatggat

SEQ ID NO: 300989 - DNA, 333 bp, Glycine max
actatacctggtatctgacatatgtgtttcttgatctatacaggcgaccgtgactacaccctgcgtactactagactccatcttagacgagatgttgatctatatgattcctcttcttgtaatgggtatgatgaaagagtggaaagaaacattcttataccctctctactacctctatacctctcttgtgacgaggacccttgctaaccaccttctgctacgcctcacagactagatcatgaactatcgttaccatatgctactccataactagtattatatttggtgtgcatatatgacatctgtctctggaccgtacttaaacctgggatc

SEQ ID NO: 300990 - DNA, 93 bp, Glycine max
  unsure (1)..(93): unsure at all n locations
agctttatgtgtgtgcaagtattttatgctggtgatgagactgaacaaagtagtgagcaataacacttaagantatactaccttatgcacatg

SEQ ID NO: 300991 - DNA, 421 bp, Glycine max
  unsure (1)..(421): unsure at all n locations
agttttcatcggcaaaaggatcgaagtgtttctgattataggcaaatttgatcatcgctactttgataaataaaaagcctgnggcaaatggagagagtaagaatgatggaggaacccatgctgtgactgtcgttcctacatggccaaatttcccaccagctcaacaatgtcaatactcagccaatatcagccctcctcattacccaccaccctatcaaccaagaacacccaatcatccacaaaggccatccctaaatcagccacaaagcctgccttccgcacatccaataccaaacaccacccttaacatgcaccaaaataccaaccagggaaggaattttccagcaaagaagcctgtagaattcacctcaattctggtgtcgtatgctaacttactcccatagttactcgataatgcaat

SEQ ID NO: 300992 - DNA, 131 bp, Glycine max
cgctttttattatggcactctcttggtggcgaaaggacttcttccatggcttattccctactggatgacctctcttctcacctcttctcctttgtcttccgctacatctccatgatggaaaatcaccatcg

SEQ ID NO: 300993 - DNA, 415 bp, Glycine max
atctaattattagtttctatgttattaacaagccgttcatgagttaactagagatttctctttgaattatccgtattctttctagactataacttaaaaacttcagaatttaaccacacctaggtatattatgataacatctgatttttggatttcagtagtctaaaaacactattcagtcgcatatcagaacactaacattgtctaccacatatgataaatggggatgttacaactgagagcataaaccttgataactatcatgaagtacaatcagcattagatagttatttgtctattgttaagtattagtgacgtatttttagtctgaactttatattaaatccattttaactaaacaattattcatgttttttataaaaagtgtcattatatgtattttacctaacaactg

SEQ ID NO: 300994 - DNA, 215 bp, Glycine max
agcttctagtctaatggacttaccttgaatgaatcgctttgatagcccctttgagcctatgttcccctttctttgttttgaagctcattacaagccttaactgaacaaccatgatcacaccctacccttaatgagatttggagctttggaattgttttgggaatacgtgtggcggggtatatctcaattgaagatatgatttttggacatgctca

SEQ ID NO: 300995 - DNA, 440 bp, Glycine max
  unsure (1)..(440): unsure at all n locations
cttccgttgttcaatttctagcgtctcgatatattattttttcgaatcttacatccgagtgaaatgttatgaccattcgaatttgtcgagagcttctgttgttgaatttcgagcgtctagatgagttatgtcaccgaatcggacatctgtgtgaagagttatgaccattcgaatttctcgacatcttccgttgttcaatttcaagcgtctcgatatattatgtccccgaatctgtcttctttgtgaaaagtttggaccattcgaatttctggacagcttccgttgttcaatttcnagggtctcgatatattatgtccccgaatcggacatttgtgtgaaaagttatgaccattgaaatttcttgagagcttccgttgttcaatttcaagcgtctcgatatattatgtcccctaatcagacatccgagtgaaatgttatga

SEQ ID NO: 300996 - DNA, 205 bp, Glycine max
agcttgctctatatttacattgatgtttgtatttatgggaggaggttatatgccatttttgctttaaagagtaatgtcccactaaaactaactctccaaatgtttgccttcgcaggaatggccccgacgaagcttgcctcacagacgtccaggaaggacaacgcggccgaacgaactagttccgccccggagtacgatagtcacc

SEQ ID NO: 300997 - DNA, 316 bp, Glycine max
cttccatccagtgttcccttgatggggacgaggggaggctttaattgctttaattacaatcctatcctcaccataagacaatttgggtaccctatgagaggagcaccattagaggaaggcctcacaccttttattgcgcgaggtttcaatagcaccaacgtgagggtgcttcatagggtccgcaaggcatgacacagggtgcaaaagatggacgaggaacttatgggaagtaacaatgggcccatcgacggttaccgtaggtggttgaaagcctacacacaaagtctggattggctttcaaatttgagaactacta

SEQ ID NO: 300998 - DNA, 318 bp, Glycine max
  unsure (1)..(318): unsure at all n locations
agcttgagttatatcgcaacaaaatgcaggagctggttagtaattcatatcttgctttgttttaatcttagattgatgtttattgcttaaggctttgcatggttgaaatcaattatttgtaggcttgctangccacctgctggtggttcactttaaagtaaaattgtgtttgcattaatgaagttattgcatgccaaagaggttaaaaataaatttattaatgatctttgacctgtaattattcacatgtttggcttgccttggttttaccacataccttctaagcgaaatagctctcgagtatactattatatacat

SEQ ID NO: 300999 - DNA, 415 bp, Glycine max
aatactcacgcttgtgcttgttttattaaaattcctaggattatgagcttctaggtgtgtcctacaatgacttgcgaaacaaaaggtgatcaaataacaagcagagatttaaaaggtactaggttgcctcctagtagcgcttctttaacgtcttgagttggacgcctgatgacttgtcggtcacggacctagtactttgcttacctttggctttggacttggtcgcctattggttggccatgtgtcgtaggcaatactctaacctttttgtggatgagctgatgggctctggaggtggcgacggtgcatttgttgcctgttgctggcgatccccaggctggtgtggtgttttgccttgcgcctgcctggggcgcaatacttcttgatgaaagctcgattagtatggaacctgatg

SEQ ID NO: 301000 - DNA, 245 bp, Glycine max
  unsure (1)..(245): unsure at all n locations
tcaagcttctatcaagtggtaatcagagcacaagagcttcaagtaggtgctccttanacttccattaattntntgctttaccttctcttccattggtgnttcttcattctttctccatgtatctcctcacatctcttgtgctacatgttcttaacatgattctctagagtttccaccgattaaacttgctatagaagctagatttgattctctatggttcacatttcttgtccttgttcttgaac

SEQ ID NO: 301001 - DNA, 407 bp, Glycine max
  unsure (1)..(407): unsure at all n locations
ntgaaaagtgttgtttttcaccttcttgttaagccaatttgctggctcagcgagcagccactaagcgcaacactcatgggctaagcgcgaggaagactctggaagaagatgagctatacaggttcgctaagcgcatcgctttatctcactaagcgcattgttttagttcatccactaagcgagaaaggcatgtgctaagccgaaattcactaatgtacgctaagcagtccataagtgtgctaagcgcacgagcacgaacaaggttgatcgaggctgtacccgaatcaaataaacattaaaatgttgtcactaggaagtgatcctacgtcgtttcccaacaagcaatgataaaccaaatgttcataacggatagtacgaaatagtaacaaattggggggggggggggg

SEQ ID NO: 301002 - DNA, 113 bp, Glycine max
tcaagcttatgagaacgtggtttcacgactggagactgtggatcatcgtgatactggttcaacttgagcacgtgtgggctcacgaggagcagcctcattgggtctcaccattg

SEQ ID NO: 301003 - DNA, 264 bp, Glycine max
gaataacgtcctatcgatttttttgatcatatttttttttcaagatatcttgattattccatcattattttgttttatttttgcttaaccgatgttatagcgtgaatgatcagtcgaaattcattttatcatttattaagtgacaaaactacttacatataccgtaaaaagcttgttaaagcggaagaaaagaaaactgaaaataagcgaaattaaagtgacaatacacacaacacgtagggaccactaacggtgtgatcgacg

SEQ ID NO: 301004 - DNA, 252 bp, Glycine max
  unsure (1)..(252): unsure at all n locations
taagcttaaagatccagtctncatagaagcctgacaagcaagcttccatcaagtggtaatcagagcacaagagcttcaagtaggtgctccttacacctccattaatattttgctttaccttctcttccattgttgtttcttcattttttctccatgtatctcctcacatgtcttgtgctaaatgctgctaacatgattctctagagttttcaccgataaaactcgctatagaagctacatntgattttctat

SEQ ID NO: 301005 - DNA, 439 bp, Glycine max
gaaactcacgcttatatctttgaaattcttgttctatatgttcaacctatttcagcttgtttgacaaattatatcaactttttatatcctaaaatgctgaataaataaatgaagctttggatggcttaaatttccatatccacttgctagctatttccttcttttgaataatgattcacgttaggttctacaaagtgacatttttaattaggcatattaagaacttggccttgcatattttgattgcacagaagagtatcattttactagaattcaagctaatgttcattcttaataattttttgtgaacattatctttaaggtctttattggataacacaatgagtattgatgttgactacatattgaacaactgaattgacacacatactagcatatatttaacagcatcaaaacatattgagtagaggccaacata

SEQ ID NO: 301006 - DNA, 236 bp, Glycine max
  unsure (1)..(236): unsure at all n locations
ttaagctttcatcaagtggttttcacagcataagagcttcaagtacgtgctccttaaacctccattgatttttagttntaccttctactccattgatgtttcttcattcttatccatgtatcttctcgcatgtcttgggctaaatgctgttaacatgatcctttacaattctcaccgattgatcctgctatacaagctagacttcattctctatggttcacatctcttgttcatgt

SEQ ID NO: 301007 - DNA, 441 bp, Glycine max
aatactcccgctttgaaatatccaccacgatatcagggattataatccttagacaatataaattgcatattacagcgtgaacatcattgttttttgtagaagacgtgcacgcgcagataccttctattaaaaaagagattggtcaagccagaaagtgttctagataactgcatcgaaacatgcttggttcctgtcgcaaaaatacaaaaaacgaaaagcgtgagctggagaatgaaaaaaaaaaattggaagaagaacaatgttggggaaaaggaagaaccagggttgtaacggaataattgaggaagaggttggtgccttgaagttgaacaggcgtagagacgatctccgatgaaagaggacttctacctcatttgcagttgcggtgaggcgccgctcgccattatcgatctttctttctttttgctcctgctactctta

SEQ ID NO: 301008 - DNA, 240 bp, Glycine max
  unsure (1)..(240): unsure at all n locations
tctgcttaaggtacttgtggctggtgcgaggcattggtggctcggtgcttgctctggctgcaaagaggaaagggtttgaggcggtagctttgagaacgatatgagtgctataagaggggaggggcactatacgggtcccattcacatacaaagcactgcttcggctgatttggaagctatagatttggacgctgctgcaaacctatgacagctggctgtatcacggatgatangatcaat

SEQ ID NO: 301009 - DNA, 341 bp, Glycine max
agagtttggactgttatccacatgctctctctctagcaagtgctgaagaaaatgtattacggaagaaggatcccagccgaggcgctgacgtaacgactgcctgctgctatgcgacttattacacgaagattattctgcgttacttcccaatgatcctacggtcttacatatgttgaatcctccacggctaactaccatataccctgcttttcaattaattctatgtaccccgtgtgcgccacactccgtccatcgcatgttatgctcgaagcgtttgacgcgcataccagctaatgatgggcgaatgacgtctatttaagcaatttatcgcttaatctact

SEQ ID NO: 301010 - DNA, 304 bp, Glycine max
agcttatattgatttggtcgaacgagggattgaggtttagtaatttaggctacaacatagaacacaagagcatgattgattagagaaatacatttatatgcatgagcttgtttgtgagacagaaccaacatttctacctactgctgtcactcctacttactttgcattctatagctcttagcataaaagtttagtttaaattctatttgaaattatcaatcatacatgttctctcaacaatgcttcatttctgaacttaattcacgctagcattaattccttgcgttcatactcggattcatcc

SEQ ID NO: 301011 - DNA, 378 bp, Glycine max
ctaagctctagcttctcaaggaagtgttctcaaagattcttctcaaggaagttttctcaagaaagcttctcaaggaagctacctagtctataaatagaagcatgtgtaacacttgttgtaactttgatgaatgagagtcttgtgagacacaactcaaagttcaacttctctccctttttcttccttcgtgctcccccctctctctttctctccctctttcttttcctccattgaagcatcctctccaagcttcttatccaagactcatcttggtggtgaagctccttcttccatggcttattccttagtggatggctcctcctctcacctattctcctttgtcttgcgctgcatctccaaggtggaaaatcaccattg

SEQ ID NO: 301012 - DNA, 293 bp, Glycine max
agcttaaatactagtgtgtgtgtgtacaatgccccttcattttatattttggacataagctatgtcctggggtgtccgattagagttgttgctttatacgcagaaattttagacactatgttcaattctaggcttagactagcctcatcatctacatactggaaacatgccaatcccgttacttttgggttgaaatcttaaaaatatctaagggtatagtaaatacccaagtgttatttttagttgttctttagtttgaaatctgattacacgtttctgtacacgctcttcac

SEQ ID NO: 301013 - DNA, 411 bp, Glycine max
tcatttaactggtcatacatgtgcaccagcgcggcagttccccaggcatagcccccactctgacccagttcttggaaagcctctagatgcaccacatgaacatgtgttgcactcttgttagaaaaaagagtgcaaccaaccaagtggaggaggtaagcacgggctgctacaatccaccatcgggcacgacatctactctgatagacatcccgaagccacgaaagtcgtacatatgccgcatccgcccgtacagtctcagatctagcctcctcatcgaagacctcaaacaactccatcaacaagaagaccgcatcgtccacaagtagaggctcaaagctgtggaacgcgcttatgatcgaaagatggaggagtgatgccacatcgtccagcgtgatcgtcaactctcctact

SEQ ID NO: 301014 - DNA, 246 bp, Glycine max
  unsure (1)..(246): unsure at all n locations
agcttatgatattgtcttggaaactataaaaataaattatttgaatcaaagatacattattttcatgcctatcaaatgtgttaaattttaaaattaataaatcattattgatataactttcatgataattattataaaaatcacgaaacttattataaatacataattactataattaaatacaaatataaaatacttcacactatcaatatataatctatttaatcaaatcanaatcaatatata

SEQ ID NO: 301015 - DNA, 482 bp, Glycine max
  unsure (1)..(482): unsure at all n locations
accgctgcctgacacattgattacatcgacatttcgaganctacgcaacacaacacctcccggacgtcttatcaatcgcaacaacttcgccgcttctcaccttctccttggcgagcgcctcgaggatcttagcgccgatgtacgaaaccgataccatctccgatcgtatgagcgtcggcttcccggacatcctagaggtgccggacaccgcatggcggtctatcaggacctgcaccactctatgttcaatgacttccgcttcttccttgatgcggacgccgaaggccgtgcggaacgcatgtgagagggctttggttctggacttatcctatgataacatttctctggcaacgattactggaaaaggggtaattaggcacgaggacttggacatgaccatagagaatgtagacttgtcggagtcgtgctctgcatggaggatgacagcgctgaccaaatcttgccatcttaatcactcgagn

SEQ ID NO: 301016 - DNA, 169 bp, Glycine max
  unsure (1)..(169): unsure at all n locations
agcttctattgtaaatacacactgctcgcggttagggcaagataccatacacacatccactctaaagatacatntactaatacgcataattatgacatcgcccctcaagctggagcatataaaacatatgccccaagcttggaaatatcaactgaatcctacgccccct

SEQ ID NO: 301017 - DNA, 433 bp, Glycine max
  unsure (1)..(433): unsure at all n locations
tcccccaattntctataaatagggggagaagtaatgtgaaaaatgtgttcagccccttatgcacttctctctctttcgaatttgcttggaaaaattgtttccgtgaagaaaatccaagccgaggcgcttccgaaacatttccgtaacgtttccgtgaggaatttcgcgaaggtttcgaccgttcttcgacgttcttcattcgttcttcatcgttcttcgatcttcaactggtaagtacctcgaaccaagcttttcgattcattctatgtacccgtggtggtccacattgtgtttcgtgtatttttattctcgtttcatttactttntatacccccttttgacgtgcttaagccattttatttaagtcatttctcgcttaacctataaataaaataaatttccaccgatcgtttgaattgtattatcccgtaac

SEQ ID NO: 301018 - DNA, 344 bp, Glycine max
agcttgccaatggaggaaatgatgtctcaatcagggaattgtcttttaaatacaatagcaaatcctttgaaatttactaccattttatatgaagaggagactgagaaaccttttctacactactaaaaaaaaggccttctacattagttttaatgaccattttacatcggttatggcgtgtggtggtagacccctgtcgttgaataacaacatcggttgaagaactagtcttagaattgtggacattctacatcggttctgaaggtagaaccgatgtaaaatgtggacattctacatcgcttgaacctttagaaccgatgtacactgttcacattctacatcgt

SEQ ID NO: 301019 - DNA, 178 bp, Glycine max
cagctctatttttacagacaagggtcatagaggtggggagggagatacgggtaccgcccgccctgagacgaaacgggtatggcgaaatgagaaacacgattcctgtgctagataagaacgagaagttcaagaaccataccctactccacccatgagtgacgaagacctagaggaactg

SEQ ID NO: 301020 - DNA, 419 bp, Glycine max
acaagtctaccaaagtgatggaacaaattatgtcaatttcataacaaaacattcagctattattatttaacatttcaggacaaaagattgtgtggtggttgtgcatccattctcaagtctatctaccaagttatttgatgaaattcaagatagagttgttagagatcgacttggcttttttttcaatcaattgtttcttcactatttagaccacaacacaattctcttttggttataatgtttcctagtgttttttattgattgtatatgatttctatagtgtattttatacaggccttaatagtattttgattcccaatagtataatttttgtacacagtgtgtacttgagttgcactacgttggttcttcttaatgcactgcaatggttctataaaatgataggtttatagaggaag

SEQ ID NO: 301021 - DNA, 188 bp, Glycine max
agcttggattttcgagctttggtgtgtggataatcggttcattgttgtctgaactttcaaggcccttcttatctcttcgaggccataaaccacgagccactcaatgaagattcaaactcttgctatacgagcattgcagaagagcaatggtgcacgagcaacccttttctcatgaagacccttctctt

SEQ ID NO: 301022 - DNA, 392 bp, Glycine max
ttcataagtgaaatcaggtgtagccattttcctaagtgtcctctcacgagatggaggttgagccgtgttctcagtatgaaaattagtagttgaatgctcaaaatcagaatattcagaatcaccagcaacaaaatactcatagtgctcaaaatgctcagaatgcacaaaatgaacaggatgcacactatgcctaagtaatctatgaaaggttctatctatttcaagatcaaagggttgtaaatcacctggattgcccctagtcatgcactatatgcagcaaatcatgtatctctcaacaagcacctaacaagggggtaaaactacagctatactcaaacaatatccaaatgagctgaaattgtgtgagccacaccctaccatcatgaaaagat

SEQ ID NO: 301023 - DNA, 222 bp, Glycine max
  unsure (1)..(222): unsure at all n locations
tttgtctatcaattggaagtcaaatgcaccatgcatgagattttcgatgctgggcaggcgatacgcatctttacgatgtgctttattgaggttggtgtagtctgtgcacatgcgccattnttcattggccttccttaccaagacaacattggccaaccaagtcgagtattagacttctctgatgaattgggcttacggcagattgtctatctctcccccgac

SEQ ID NO: 301024 - DNA, 429 bp, Glycine max
actccgcttagatttaatttacataaaaataattttctttttgtcagttcactttggttatgattaattataattggcttgtcatcaaggtttttaaaaatggttcccattgtaattgcgattgtaaaattaaagattttagagttattgtgacttcattacaactataattatgattgcatcgaccatatttctctgtaatttctcaccacatcaaaagattgtaaccaaagtgtgaattactttaatttagaactcttgttttcatacataatattcacatataaaaataataattaatcttcgtcagagataattaattacttattaaaaaatacatatcattattaattatgttaatcaatattattcatgcactatatttaaatatattatacttagccaaaaatagttcatcacatacagata

SEQ ID NO: 301025 - DNA, 269 bp, Glycine max
  unsure (1)..(269): unsure at all n locations
cccctgggatactctgagtgacctgacgcattttatttgtcagggggctgtttgatatgtaaaatgctaaaactaaagtctttacttggatctatacaattcacccaacggttgtaaagagtccagngggctgaaagacgatgattatataatgcacaattttgagaatattgctgtatgactgtgctaatcctaattgtattgagaatattgctacatgattctgctgatcttaattgattctatctcgcgcaattctgattgcatgc

SEQ ID NO: 301026 - DNA, 462 bp, Glycine max
  unsure (1)..(462): unsure at all n locations
nccgcggcctgacactttgaaccttgcanttcgncgaactttcgaanacnnccccttnnngagtgtaggagggaattacgactttgntaaagttatcagcccanacgcagtgctcgtctggtgaaatggacctccaaaaaggtgttcccggcatagaagcgcttgttatatgcgtgcaatatcaggtctatggatgatccatgaagactatctagaagtgttcagagcgtggcatcaacgactcccaatcgtactacaatgtacataatcctccggtgagaatgtcactggaaaaagagtctaacaacacttgctgcaccgaacattggcaaaaattgtgtatgatgaattgtagccggatgcactacaattatgccccctcgccagcttaaccggcattgaggccgccacttgctcacacttgttatacaacgcgaaaatcgattgatacttgtactgggc

SEQ ID NO: 301027 - DNA, 479 bp, Glycine max
  unsure (1)..(479): unsure at all n locations
ncgccgcaccggatttgatgcantgcancacatttggcttttgccacaccgccacncgcggatcctttatagtctacctgaggcactctctttatttgatcgcgtgatcaatgggtcggggtaaataccgtatcctacctcctgacataatacctaaaatcatatcctttctagaaacactaactgctaatctttgtacttattctgtttttatccgtacacatttattaacttttccttttaatcttctccattcttctattacatatgatatcgatctcatatactacaatcttacgcggccccattcctattctatatcctttatacatcccaaggctcaagcgcttaaacttgatttacaactgaactgatccatattccacaacatattttctatcccaacatcaaacccaactctgatgacacgcctactcaactctccattcatggcactccatatttcgcactttctcacc

SEQ ID NO: 301028 - DNA, 398 bp, Glycine max
tctacttatgtggcagggcgggcttccttcaccttcttgtctccaacgtgttctttgaccattgttcttccttcccgcgatgcttcttttcatgtccgcctgagtgggcttatagcctaaaccatacttcccacgatttccttgggtatttatcaggctagttatgccgccgttgttttttcctaaacccatcccgggttcataaccgttccccaacataactcgggccatcattaccgctgcatcggacagacaaggctgcccaaagagggagtacacggaggaaatgctgaccacctcaaaagactggaaagcagcttgtgacgattcttctgcggcttccacataacgcatggaggatgggcagcttaccaagatatctttcttcgctgacacga

SEQ ID NO: 301029 - DNA, 343 bp, Glycine max
tttagcttgagatgacgaagtgttgaagggcgaaacttcctgcttttattgttgaccacagagtggtacctggagatatgtcgcgggggtcacgagaccttggggacgtcacgtggggtgctattgcccaaaaccaagcttgaccaatcccgacccaacccgggcatagtcggtcagtgagaacatgtgacgtacctaagcaggcgagctcctgccagtcaacagataaaaggaaaacaagaccacacagcaccgaggcttgtggtggctggccagctgtgaatcttgtgtaatatgtggattgtggccctggtaatcgattaccaacggtgggtaatcgata

SEQ ID NO: 301030 - DNA, 433 bp, Glycine max
  unsure (1)..(433): unsure at all n locations
tctattctgaatttcaagcgtctcgatatactatggttcacaatcgaacatccgagtaaaaagttattatcgttagaatatgctcagagcttctgttttcagtttcgagcgtctcgatatattacaggactcaatcggacatccgaattaaaaattattgtcgtttgattttgctcatagcgtctgcttttaatttcaggcatgtcgatatactgcaagacacaatcggagatccgagaaaaaatttaatgttgtttgaattttctcaaagcttccattttcaatttcgagtgtctcgatatattacaggacttcatcggacgtccgtgttaaaagttattgtcatttgaatntgctacgagcttctgttttcaatttcgagcgtcttgatatattacgggactcaatcagacatccgagtaaaatgttattg

SEQ ID NO: 301031 - DNA, 249 bp, Glycine max
agctttgagcaaattcaaacgacaataacttattactcggatgtctgattcagtcccgtaatatatcgagacgctcgaaatggaattttgaagctctgagcaaattcaaacgacaatcactttttactcagatgtctgattgagtaccgtaatatgtcgagacgctcaaaattgaatactgaagctctgagcaaattcaaacgacaataacttgtcactcagatgtctgactgagtcccgtaatatatc

SEQ ID NO: 301032 - DNA, 414 bp, Glycine max
tgaagtgaggaagtgtggaagggttagacttcctacttttattcgttgaccatagagtggtacctagagatatgtcgcgggagtcaggagaccttggggacgtcaggtggggtgctattgcccaaaaccaagcttgaccaatcccgacccaacccgggcatagtcagtcagtgagaacctgtgatgtacctaaacaggcgagctcctggcagtcaaccgataaaagaacaaagaccacaaaccaaggaggcttgtgtggtggctggccagctatggatcttgagtaatatttggaatatggcctctggtaatcgattaccaagggtggttaatcgattacgaggcttaaaaatgaagacacgaagttaagatggcctctggtaatcgactaccaaggatgtgtaatcgattacc

SEQ ID NO: 301033 - DNA, 218 bp, Glycine max
  unsure (1)..(218): unsure at all n locations
agcttgtaatcgattacacatatactgtagtcgattaccacaggagtttttcagaacacattctcaacagtcacatctttttatctgtttcttacatggccatcaaggggttatatatatgtgacttgagacacgaatttaacaagagtttctcagaacanaaaggtcttatcctcttataaagcacaatcgttttattctcttacaaattccttgcc

SEQ ID NO: 301034 - DNA, 417 bp, Glycine max
  unsure (1)..(417): unsure at all n locations
tcgggtgatctactacgcttctataactttggatgctgcccaagcaaattacactaccacagagaaggagctattagcgatagcttttgctcttgagaaatttcgttcatatttgcttggtactcgtgttattgtttatactgaccatgcagctctgaagtacctgttgaagaaggctgaatcaaagcctagattgatcaggtggatgctttggatccaagagtttgatttggagatccgtgatcagagcggtacacaaaacctcatggctgaccacctgagtaggattgagcgtgcgcctgaggactcacccattcgggatgatttttcagatgaccatttgtacattctgtataagatctctgattccttccccactccttggtttgctaatattgtgaattatttggttgcttn

SEQ ID NO: 301035 - DNA, 268 bp, Glycine max
agctttccacatccgatcatggaaggacctggcaactgcctctattatgcagtaccagtacaataccgacatggcttccgatcggaaccagcttcagggtatgactaagcgagagcatgagtccattaaggaatatgcccaaagatggagagatcttgtagcccaagtcgtaccgccaatgacggagagggagatgatcacaattatggtagatacgttacacacgttctactatgaaaagctataggctacatcccactaactttgc

SEQ ID NO: 301036 - DNA, 424 bp, Glycine max
  unsure (1)..(424): unsure at all n locations
attctccccttttgtcaagcaaattctttttgacatcatcaaaaccttcatgatttacattctcccccctttttgatgatgaaaatcattatccaaggcttgatcttttttacatcatcacaatcttcatgatttacattctccccctttttgacgatgacaaccacttgtaggttacgagcaacaacaaaacgaaacgagaaaaaaatataaatcgcatagtcaattttcttagggagaaatgtggcctttgtttgttgtcttcataaatcacatatccatttatcttggtgagaaatatgaataaactttgatgcatgccatgtgtttgaagaaattgctatcaatgtatcaactntgctcttctctgttttcatagtctttcatcatgatacccagacttatgatgttattctctgaatca

SEQ ID NO: 301037 - DNA, 172 bp, Glycine max
agtttccatttgtggggcacgcttttcacaccttccttgcttggtcgacagatctggtcaagtctttatcacaacatatacttattgtccttactatatgttccctctttttaaattaattcattcagtgtgcctaaacttacgctatttacctttgtcctatgaataggta

SEQ ID NO: 301038 - DNA, 428 bp, Glycine max
  unsure (1)..(428): unsure at all n locations
aagtgaaatgtgtaaccattatgtataattgcaagtttttataaagngatctaattggaatcctacgtgtaagcaactaatctaatcatatcaacacattatattttcaacttacaaccatgtgaacaactaatcttatgatcaatactatcatcaatcctgtgagtctttcaatcttatcggcaatgtaacaattacgaatcaaattatcaatactcttcctttaattattttattaagagacttcttttccttttctaaaagcttagacataattaagtgaaagactcaccatggaacacgttgctagctatagacaaaggaactctgaaactttaattaacaagacaaggttacactacaccaaatattattattttaattaaatgtcagttatcaataataataaattaattatcactcttatc

SEQ ID NO: 301039 - DNA, 143 bp, Glycine max
cgacattgtagataaatagctatgactttcacgctaaaataactacaatgcatggttggcactcgaatatagaatagactgtacatgcatacgagaagatcgtgcagaataatgctatagtactacactggaagtactagagg

SEQ ID NO: 301040 - DNA, 200 bp, Glycine max
agcttgtaatttaagaaaagagcaacacagagtcatgtaataagcctaaaacaaactataagtataaaatacagcagatgcaccctagtggatgtaccctccactacaactgacccaaaagagatgtaccctctcttgttctcactcaaacccaagcacatgtaccctctacttgtaccacaaaggatgtaccctccaat

SEQ ID NO: 301041 - DNA, 426 bp, Glycine max
acactacagaatacttacgcttctaccatggatgattaaacattggtgtgttgcttctttctttatattggttaagcattcaaaaattgtgtttgtcttctgtcttgagtggttaagcaccatgtttagcttctgctcttgatggttaagctttggtttgcttctaccttttaggtggttaagtgtgtttgcttctgctaagtggttaagcattgtgttgtggcttctacttaatggttcaacatattccaattgtctttgaatgtttttcagtcattttcaatctgctgccaatgtgtttccggcatgtttcattgtctatttttctacttgtattgttcatcccaagctggaagtgttgactccaccttccatctcgtgagggggagtgtgttgtctcctaatcagtactaatcactttgaagt

SEQ ID NO: 301042 - DNA, 393 bp, Glycine max
  unsure (1)..(393): unsure at all n locations
agcttaccattataggaggccatggataagagcttggaggaagaacgagatgaatgaagggagagggagagaatagcacaaaattttgtgctctaaatgagctttgaaatctgaagtttaatattcaaatggtcaaagttaaaaaaaatgcacacacatgacctctatttatagcctaagtgtcacacaaaattggagagaaattcgaatttcaattcaaatttcacttgaatttgaaattgaatttgtggagacaaacttcggagccaaaatttcactaattatgattagtgaattntagttatggttcagcccactaatccaagatcaatctcaagattctccattaagcgtgcttangtgtcatgacgcatgtaaagcatgaacgacatg

SEQ ID NO: 301043 - DNA, 405 bp, Glycine max
cttatttccttgtagccaaaactcaggttcattgagctatgcacccatcctggtagctaagctcaagtctttgtagccagaactgaggttcattgagctaagcgccactcatggcagctaagctcatatccttgtggcaatgtaagcactaagcgattccttttccgctaagcgcatgcttctctgtactcaagattgcatcattttagctaagccgacttggtgcccggcttagcgagagttgtaggttttttgatctgtagaactcgctaagcgatcttatcggcatgctaagccaagcctttgtgcaaaaaaaaatttgattttgaatttcaaacatcggctaagcgcgcaaatccgctaagcgagcctctttgagaaaccaaacgtctctctggctcgctt

SEQ ID NO: 301044 - DNA, 163 bp, Glycine max
  unsure (1)..(163): unsure at all n locations
agcttatcaattgaactagaaaattaaccaagttctctgtttagataaacatctctgtaagtatctatagaagacaatgagaacgtacaatgaatcgagcttctaacataagttaaaattaacttacgcacttaactctntctagaagctctttttatttaat

SEQ ID NO: 301045 - DNA, 422 bp, Glycine max
ttgtcaataataatttaaaagctagtttattatgtgttctgcacgagaactaggtccctaacataaagggcatgtgtgtgttgagtttatgaattcttcctaaagaggcttgcctggattgaatctcctttctataggaagatagcttcattatgagttttggcccataatctgatagttcccaataagagaaatttggactagcttcaggatcatccaacaaaatatctttagtctgaaaggtcacgttgttaggtttggacgaccatgtgtctcatccaccttagattttgatgaataacaataagaataaattattgatattctaatgagtctttgagaagtggacatgattactatgttaaaggaatttaacacattaaatatcgtccacaacaatagagtatgctttattttaacct

SEQ ID NO: 301046 - DNA, 222 bp, Glycine max
tcaagctttgcatgactactatgttcaactggcttgcgcacattaaggacagaatcctaagtcgtacaagacaataagtattaagactaatcaacaagttaacaaatattacaagtgtgtattcaaatgacaatatggtagggggattattatattacttacataagataaaggtttcactagatgtatgggccatccaatgaatgacttcacggcgttcct

SEQ ID NO: 301047 - DNA, 414 bp, Glycine max
ctcccgcttatggaattatatcaatttatgagggctttaattcgttttactgagagtatcatcttagagtggccttcggttccaatacaacaattgctttctctggatggcattaataaaatcatttccagtgctcatttttctgttatttcctgcattacatattgctctcaatcttttttctccttggagtttatcactatcccaattcccaattaactttatttcattgtacaactcaggttcattgtatgttaagaaactgagataattacccttatttgtgagtgtactctattaacactctatgtctacatatcatttagctaagcgcgtgtaagtgtgtattgaccattcaaggatattctcacgaaatccacttacttctatcttcactcatatttcacgcctcac

SEQ ID NO: 301048 - DNA, 166 bp, Glycine max
atcctctacagtggagatgcacgcattttatcttgctgctaccatactatgtccgttagagattatggcacatgtttgcaataggtatgtacaataggaatcgtttgtctagctatgacccctacacagctgaggaagatgcctttatatgagcctgatcctctcc

SEQ ID NO: 301049 - DNA, 429 bp, Glycine max
tcgtcctcagatccctcttgttggactatgctcaatttatgacagccctcctaggtttagactaacttaaactaagcttcctcctcagatccctcttgttggactagacttaacttaaatagcttacaaaagtttagactaatttaacctaagctttgtcctcagatccctcttgttggactagacttagaccaaacaacattattgtaacaacaaatttaaaaccaaaacttaatctgcagatccctcttgtaagactaagtttcaattctgcttcattcaagttctaaggcaacaatacatttcccaatgctaaagtcacctaaccaggcacacaaatgggtgatcagaccaaaagcatatggaatttaagcactgaaagaagcattgaacacaagacacacaatcaattagatatcacaataatta

SEQ ID NO: 301050 - DNA, 250 bp, Glycine max
agctttctcatttatgtcttatgtcatgattggtatgagttaatttaattagaaaagatatctaattttatttttgcatcaagatatttattatttttatgcagttatacttatttttgacaattagtggagtgtttattgttttattatcatccggataaaaaagtaacttgagagcttttggacatcaattctatggactctttactacacgggttttgttttttcacaatcaccaccatggaataca

SEQ ID NO: 301051 - DNA, 433 bp, Glycine max
tgcttgtggggcttctatggaggctggatctttaagtcttaatgaggtccttggatggtgattttccaccatggagatgcagcggaagacaaaggagaagaggagagaggaggcggcatccactagggaataagccttggaagatggagcttcaccaccaagatgagccttggagaggatgcttcaatggaagaaaagaaagagggagagaaagagagaggggggagcacgaaattgaaggaagaaaaagggagagaagttgaactttgtgttgtgtctcacaagactctcattactcaaagttacaacaagtgttacacatgcttctatttatagactaggtagcttccttgagatgctttcttgagaaaacttccttgagaagcttctttgagaaagcttccttgagaagctagagcttagctacacacac

SEQ ID NO: 301052 - DNA, 331 bp, Glycine max
agcttcaacctttggccatcatttttgcccgaaatcgtgaaaggagagcattttcggggtcgcgaagtgcgtggctacgagtgggacttcgaaaatccacgcttgggtggacttctttccctcttgattttcgtgggtatggggttttgggagatatgacgggtagtttcgttagttctctgctgtgtgatgattaattgtgaagacatttgctgaacacttgttgaaattgccatgtttggatgagctaaacatacccattctgttttacggcttttgtgatgacgcttgtgatgcttatatgctgacattgctgatggaaatctgctac

SEQ ID NO: 301053 - DNA, 427 bp, Glycine max
tgtcacaagtatatttaacctgaacctcttagaagcttggcaaacataccagccagctgattgctggagttaacaatgttggttgtaatttcgctggaaagcaccttttctctaacaaagtgacagttgatctttctatgcctttgatcttttcatgtgtttgtctcccaattttagttgttggagtagttgcctaagttccataagctcacatgtgactattgccatagaacaaaatccaacttttgcactggatctagtaattatgttttccttattgctcttccatgatattaggtttcctccagcaagaacacagtatccttaagtggatcttgtgtctaagggtgacctttcccagtcaacatcagagtaatgaatgatcttttcattgcctttgtcctcatgtaataatcctttacctagt

SEQ ID NO: 301054 - DNA, 338 bp, Glycine max
  unsure (1)..(338): unsure at all n locations
agtcttctaaaagtgctcatgggtgaaaacaaaaatggaggatgaaaggggaaagaggaaggtctcttaccactaaaatcaacccaaaactcaaaggaagcacaaatacaaggtcccttgaacaagaaggatcaaaacctcaagctctccaatagagggtttttcttgaaagggaagaagagagtgaaataagattgttgtatgtttggttcagttntgattccactananactgagtatatgactcttctcctcctctctattcacattccatcactctctaaactcactcaccccattcctatcattcaaggtgcattcctctcaatccgaacact

SEQ ID NO: 301055 - DNA, 415 bp, Glycine max
taatgaaaacaccttattgttattatcctagaattctatgactatgaggcctccagaaaaggggagattaaggagaggaacttttctgattatattgcttccttccatttgagtacattgtttgctatatataagtttttctgctaacactttgcaaatggtgcttttgggatgtttccttggaggaaaagcaaaaattacaaaaagtgaaatgcaaatcctaacggcattgtactcctcagccgatagaggaatcattgcatgcgcactacctcctgcaaggtccgccatgctcactccactacttgttgacaaagtcctttaggtaataaggcttgttaatttccctttttggccttcagcattcttccttgtttggttctgcctcattctctgattatgctgcatcatttga

SEQ ID NO: 301056 - DNA, 248 bp, Glycine max
agctttcataagtgaaatcagatgcaaccatctccctaagagtcctctcacaaggtggaggttgagccatgttctcactatgaaaactaatagccgaatgctcaaaattagcatattcagaatcaccagcaacagaatactcagaatgctcaaaatgcacagaatgatcaggatgcacactatgcctaactaaatcacctgaattacccctagttatgcactatatgcaccaaatactgtgtttttca

SEQ ID NO: 301057 - DNA, 424 bp, Glycine max
  unsure (1)..(424): unsure at all n locations
ctccgcttgatatccgntataagatgattaagaactagttttctagccaaccaaacaaaaaatattttgattntttttagagccattaatagcttggtagaataaaaaatacccggttcttcaagcttgttctgtaagagccagaagtggcagtggaaaataatacttgtaacatgttgaagttagtgaaacttggtggtttgctcgaggtgcagactttaatgaatttgttaccacaaccgatctaaaaggacgtcctcatgcttcttaagctttacccaaactgaaccttttacattggttgtcaagcaactgatttaaaaagtaaatgttntatatcaattgtgtttacaaccgatgcaaaaagtattgatttctatcacataattaatggatctaacaaaaaaggcacaactgtttcttt

SEQ ID NO: 301058 - DNA, 286 bp, Glycine max
  unsure (1)..(286): unsure at all n locations
agcttatatcatttcattaataagaaaaacatcaatagttcaatacaatgatgagaaacatcaaaacattatggattagcatacaacctagacgacgtctttgcaaggacatgaaccatttggttcgccaaaattcacatttgagttactagttaaacgaacgttattattacaaaagtgaaaccaatttcgaatccatatatattggagcacgactgaagcaagtcacanacatgtttgcaatcagtctcgaacgtgacgttgttgtcgccaactcaatcgtcct

SEQ ID NO: 301059 - DNA, 360 bp, Glycine max
ctcacatcaaggatttcttctattaaggatttaaactttcttcttttaaaaattgcaagatcactcctgccctttcaagcttaaaaacttcaaggtctggtgccaagtgtaatacttacttcttctgtttttctctttaatttcatgcagagactgtttaaatgaattttatgttatctcacgagctttggagctaacagggttctaacaactgctgtacaccaaaaagaaacaaactccctagcaagctctggcacaaagcatggacaaatggggtattacaacatcaaagaatgaccattctattgacagcagcgacaatcagaagtcctcaaccccatgtttgaagacgaaaactat

SEQ ID NO: 301060 - DNA, 222 bp, Glycine max
agtttttgttatcggatctgccacaggccacggtgtcttgaaaccaaattaggctggcatccaaccaggcctaaatagttcgattgaacacctgcacgacaggacaggatctgtggattcaagtaaaatgaccatatctcatctcacttttcttcattgtccggatcgacagcacgaaaatcgtcagtgaaccaggccgggccgacctttcgactaatgaat

SEQ ID NO: 301061 - DNA, 447 bp, Glycine max
aactccgcttcctgcggccattcctgcgaaggcaaacatttggattgttagtttttaccaagaaatgctacccttaaaacaaagatggcatacaactccctccaataaatacaaacatcaatgtaaatttagagcaagcttatgcgcatacttcttcacgaacgttcacttgcacaagacattcttataactaagaaaaatgcacccatatacaatcaaggcaccttcgttacctagattatttacatgtacttccaaggtgtatttgttaccgacatcacacacatttcctttgctaaattcacatacatgcatactctaagcactttggctatcaaaaattgcatacgtgcacatcttggtatttctaatacctatacatacacaaacttcatgatgaatcttgactatctacacaataaggtgctacatttcatggcccttttt

SEQ ID NO: 301062 - DNA, 210 bp, Glycine max
agtttgacctatcccgacccaaccagggcatagtcggtcagtgagaacctgcgatgtacctaaacaggcgagctcctggcagtcaacagataaaaggaacaaagaccacaaagcaaggaggcttgtggtggctggccagctgtgaactcttattgatatgtgggttatggcctctggtaatcgattaccaagggtgggtaatcgattaca

SEQ ID NO: 301063 - DNA, 289 bp, Glycine max
ttcgctcacgacattatataacacgccctgagtccatcgaatttgaaccaatttttaacaacactttaagcgctttctatagagaataacgtataacacacgtactctatagaggaagggagagattgtagagactaactatactagactcgatataaaatacacgttatttgagcgatctacaaattgatacccttcactgcatgtgaactgaagtaattgcaatataatataactgtcacagaaattgaacatgaaagactaatcaattgcaacgtcacttgaagcc

SEQ ID NO: 301064 - DNA, 274 bp, Glycine max
agctttgaactattgtaagacacattttctgcgaccttcgcgattctcgactccatttcattgaagcgcatatccacttgtaattccaaagtgtcaaccctctcacccacaaaggtctcaagaccatcaaacctgtccacaatcttcgaaagaagagatgaatattccacatgatgcccttctttaccaacattctgaccacccttcttcacccaagacccatcatgccctttctgataaccaaaagacgctatgactcgaacgcctataacga

SEQ ID NO: 301065 - DNA, 429 bp, Glycine max
actcgcccacttacatcaaccagtatattagcacacttgatatctctttaaaattgaataattgaattgaaacgctcagaatgtagcaaatcaatgcaaattcaagatatttaagaagttaatttccaagcactgcatccaactttcatcttttgcaatgattgaaagtcaagcatttttcacaatccgaataaaatctgtcaaagcaaaactcatcttcccgagcggagaatcatactcagtatctggtttctcaaaaattttctcaatataaatatatgtgcaaatagagctataacatatcctctaatataagaacagaaatactataactattggtaacacatggctagaatgctaacttgttaaagaaacttccaggacttcagtagcaaaatattcttttatttttcaattcataatgcatat

SEQ ID NO: 301066 - DNA, 326 bp, Glycine max
  unsure (1)..(326): unsure at all n locations
agcttatgatataagaagttgggtttcttgattatgagggaacaatatattgcatgccctttacaagttagatggtggctttgaattaatattaatggacatcactagtgggtttttcatggttagttttgatttggatactgatcgagtattcgaatgcgcatgtgttcttcgatcattacctaactgattgtccttgaacactagatttctcaccaacagaggcggcatggatagaaccctagcctaactanctangtttggtttcaggccttacgatgatatattacgatgagtgcactcttatatatccaatattgctttat

SEQ ID NO: 301067 - DNA, 148 bp, Glycine max
tgcatacacgaaataatactccttgtgagtacgaagatggagtggagatttcttttcaaaagaacattacaagagtttgatatccaagactcatagttggggctcctgccatatacccatctactatcaaggcacattatgcatagaa

SEQ ID NO: 301068 - DNA, 266 bp, Glycine max
tgagatccctacagtgcttctcatgagtgctcacatcagacagcaccgagaactgcctctggttgcacctctcgcacacgtacattttcgggcagtggcttatcttgtaatgggtcttggcactcatcattgacttcagtggctcgcccttggcatgcctctggctccacctacacacctcttgaagacacgaatacatcgttggcttcacactcatctaacactctatacctctgctgatcttacatgcgtgactcatatcagca

SEQ ID NO: 301069 - DNA, 157 bp, Glycine max
ctccagtttatcggcaaattccggcgccggtgcgcgaatgcttaaatgcgcccatccctacacattgcatggcacactctgacctgcccgtaccagaaatagacaaatcttcaagtggcgctagattactgtggtctctattaatctatgatacata

SEQ ID NO: 301070 - DNA, 407 bp, Glycine max
  unsure (1)..(407): unsure at all n locations
cggaaacaaggcaagaaagttagacacttgaagcttctataagccaatatgcacaatcatattgtgcctacatgtatcgaattaattctcctagcgtaatgaataactgtttagtaaatataattgatactaaataaaaataaaaatgatacttggattaacatgtcgtccacttggaagtatatcacatttgattgcacgcttgcggtaaaagggaatacaaggaaaaaacaaggatttcacaacctaaaacttctgaaattaacacagaaaaatgcattttgcatcattttctagtagctatccacgtttggcacttaaaggaacatgctttcatcatggggagtcatcctaaacactaccttgaacattttnccaaggattgacctctgtctattctattctct

SEQ ID NO: 301071 - DNA, 107 bp, Glycine max
ccttcgagcctattttccaccttctttgtttcaaagctcattacgagccttaaccgaaaaaccatgatgccagcttacccttaacgaatgttggagctttggaattg

SEQ ID NO: 301072 - DNA, 430 bp, Glycine max
  unsure (1)..(430): unsure at all n locations
atccaccatcctagcgttacaatatttattaatcatataatngnaagcataagcattaggcacaattccacttggcttcatattctcatacatttaaaacccttccctttgaaggccttgcttgaaaaagccgctcattaacacaccacaactatggtggttggcaaccaaacccaacctatccatcgtgcaaaacaacttctttgccagcctaacatctgcactcttgcaacacccataaatcaacgtagtgtatataacaacattcagagagaaaccaaactcttncaacatggccaaaagccgaaaccctttcatcaagtcaccagcttcacaacgacccttgatcataatcccaaaactgtaggcatccataacaactttacgcttgaattcattatatacccaccaagctatatcgaaacaattt

SEQ ID NO: 301073 - DNA, 322 bp, Glycine max
tctgttttgactgaaatcacgcaccacaattttttttttttaataaaaagttcacttttttagcgtaaaggttgaagattctttgtaaacaattttcattaaaactcatgtgatatgtgtgtgattcggctctatacataaattaaatgtcattaatgagtacggggaagataatgtaacgtttagtaaataattaggagaatatttgtaggttctaaaaatagaaaaaaatatgtgtcattttctcaaatttttgagagaaatccatatcattcactcatataaacattgcatacaaatatatattgaatataacaatatc

SEQ ID NO: 301074 - DNA, 425 bp, Glycine max
  unsure (1)..(425): unsure at all n locations
atactcacgcttgccttgccccttgatatatttgagggtttcatggtttctatgaatgacatattccttgggataaaggtagtgttgccatgtattcaaagcccgtactaaggcatacaactgcttatcataagttgaatagttaagggtgggaccacttaacttttcactaaaataagcaattggatggccttcttgcatcaacacagccccaatcccaacatttgaagcatcacactcaatttcaaaagatttttgaaagattggcaacgcaagtatgggggcattacttagcttttgcttaagaacattgaaagcttcttattgtttgtctcgccatatgagaccaacattcttgttgagcacttcattgagaggtgcgtgcaatgtgctgaaatccttcaaggatcggctataanaacttg

SEQ ID NO: 301075 - DNA, 246 bp, Glycine max
agtttcggtattcaatttctagcgtctcgaggtattacgggactgaatcagacatccgagtaaaacgctattgtcgtttgaaaatcctcagagctttggaacttaatctcgagcgtctcgatatattaccggtctcaatcagacatcccagtaaaaagctattgccgtctgaattagctctgaggttcagaattccaatttcagcgtctcactcattacgggactcaataagacattcgaccaaaa

SEQ ID NO: 301076 - DNA, 294 bp, Glycine max
agctttatccgcagatccctcttgtaagactaggcctagactaaacaacattattgtaacaacataattaaaaccaaaacttaatccgcagatccctcttgtaagattaagtttcgatcctgcttcaatcaagttctaaggcaacaatacatttcccaatgctaaagtcacctaactatgcacacaaatggattattagaccaaaagcatacaaacattaagcattgaatagggaaaacatcatcaattacatattaggtatttacatcagctgttcattagaaatccccaact

SEQ ID NO: 301077 - DNA, 420 bp, Glycine max
tccgctttataagtgcgggtctgggagactaaggccaagtggtctcgatgtgtgaagatgatgttccaagacctctggatttggtccgaccatgccctcctgatttccagctgggaaattggcgggtggaggaacgccccggcatttacacaacaagcataatatccgatgacgagtcccccgaaggtactaatacctgtgacccgtctatcaatttcgagcacgaaatgagccaaacggaagatgaacgagatgagggggtgggacttccttcggaactagaaaggatcgttgcccatgacgatcaagaactggggcgtcatcaagaagaaacagagcatagagacttgagaattggcagtggaaagagggaagtaaagatatgtgcaggcattaccgcacctatccgtgacgaattaa

SEQ ID NO: 301078 - DNA, 240 bp, Glycine max
agctttgttgagacaacttccttgagaagcttgtttgagaaaacttccttgagaagctagagcttagctacacacacccctctaataactaagctcacctgcttgagaagcttacttgagaagatctctacagaagctagaacttagctacacacacctctctaatagctaagctcacctacttgagataagaagctagagcttagctaccacacccctataaaaactacgctcaccccc

SEQ ID NO: 301079 - DNA, 365 bp, Glycine max
tgaatattatgtgcttatatctattcccaccactattggtggtctctagtagtatcttggcaccaaatcatcattggtgatgatatttcaacttataagttagactctgatatcaatgattcatatttgtcactattgcattgaacattgatattgttcttaccactaattgagtagatatgttacttgactatattcatacttagatttctttacagcaagaaatcatgatcttagataattgttggttgtacactgcgacttccgctatcttttgtattcactactacatgatacatgagtaaatgacttcctgctgtgagtgaaaataaacattgtagttaaattcacattactttatctca

SEQ ID NO: 301080 - DNA, 312 bp, Glycine max
ctctttatcacgatttgcttacatgcaagctaggaaatcaacaccttcatctactctcttcatcattcctcttcattttatttctgagatacaagctttaggtaagggggctctttcatgtggtcatggcaatagacaatggaatcctcaaatgtcaccttatatatctgcacagtgtaagggcattcatattacaaatcttattacaactgctccggaaaacatggtctgtctggggagctcacccatgtattctgcatatctttctcaatttactgctgaaaatacaatttcatgttgaattggatgaac

SEQ ID NO: 301081 - DNA, 267 bp, Glycine max
tactggtctaactatttcgtgttctgctacaaggtgcacaacaagtgcataatcccacgtactggcctcatgagaatatgctatctgttgcacgtctctgactgtttactcgatgaatcagattgtgtttgatgacctgatagcagctgtagaagaaccacgagcagtatgttctgctgacttattaacttttgatattgtatcttctgttgtccccaccagggctaagtctctggcttactattgtgctccttctgcataccctac

SEQ ID NO: 301082 - DNA, 127 bp, Glycine max
agcttgtaacacctaacagacgatggcagacgatcatatctagaagttgaagacaatatgcatcccctatactagcacacgaatggattgcagaagagttcacagattataacacaggaatactgcc

SEQ ID NO: 301083 - DNA, 424 bp, Glycine max
  unsure (1)..(424): unsure at all n locations
tatctgacaaagatgcgtatcaacagtttttgcattctcttgattatgtcaagattcanaataatgtaagtttcatttctttactctaatttctagtgatttattaccttggaactggtattttttttttggaaggcgaagataatatattatatatgaaaccaagtaccagaggtactacataatacagaaaaggtcctgataatcaggagatacagcaccctccacagatgaaaaccctactaacagaagctttaactaaaagctatagacatatttgaagaccaactataataaggaatctggaaattcctttcccaacccctcagccaggtccataagagaaacagagtgctatctgtcagtctagtgatatcaaacgttngattctggaaaattatatcatttctgagcctccaaattg

SEQ ID NO: 301084 - DNA, 268 bp, Glycine max
agcttgaattttttcctaaatatatttattgtcacatttaaaatatcatttaaaatctgttttggattatatatcaaaatgttatgatccaaccttaaccataatcatgactaacataagctatgtttaataagacattttagttaattctttatttttattagttgaaaaactcaattgttcaataaacaagtttttttaataccttctaatctttgatatcttttctaattctacattttctaagtactctaacatctaactttac

SEQ ID NO: 301085 - DNA, 421 bp, Glycine max
  unsure (1)..(421): unsure at all n locations
acccaacccgggcatagtcagtcagtgagaacctgtgatgtacctaatcaggcaagctcctggcagtcaaccgataaaagaacaaagaccacaaagcagggaggcttgtgtggtggctggccagcaatgagtcttgagtgagatttgggatatggcttctggtaatcgattaccaagggtaggtaattgattacaaggcttaaaagtgaagacaggaagctaagatgggctctggtaatcgattaccaagggagtgtaatcggttaccaggcttgaaaatgagatcacgaagctaggagggcttctggtaatcgattaccaaggggtgtaatcgattaccaggcttanaaatgggactggaatgttgaacgggcctctggtgatcgattaccaggctgtgtgatcgattacacagaggaat

SEQ ID NO: 301086 - DNA, 397 bp, Glycine max
  unsure (1)..(397): unsure at all n locations
agcttgtatgattatggggtacctatcacatgtggtactaggtggcggtcgggtgatggtgcacaacaagtttttccacatccacaaagcgtgcataaacctaccatcccctgttgcccacctccaactgagctcacgtactcccacgtagcccatatccttgtttctctcaacaccgggtccccatcaatcctcccaagcttccacaacatccaagtaatacaacatttaaacagcacaagctatcacagcaaaattcttctgcacttgtgcaaaattctgctgcacaatttcacagcaaaaatctgcacaaagtgcagatttcgaaaaccacacttccnctcatcaaatcctgcccaaatcaaatcctacaagtcccaaatcatgtatcaatcat

SEQ ID NO: 301087 - DNA, 410 bp, Glycine max
  unsure (1)..(410): unsure at all n locations
cttctgtgcgaggcattttctgtaccagcagcagagaaatatgagtgcttataaaaaacgtgcttctgggggtgttggtgtgccccagacaagaggaatgaaacaaagaaaaaaacctgaaggtgatttggaaaatggggttgtgggtgctggagttgttggcgccgatggtgatggcgccgatggtgatcacactggtggtccccatgttgttgaggaatttgctgggctttttggtgaagggcatgatggtggggtgaatcttggcttgggttgtgaaagttttgacctttggggtgaagtagagggtcagcatgttcatatgggtggctttgggggaggatgtgggaaactgggtcangttgaagggcaggttctaggtcagccatggagcaatgcaaatgctggtg

SEQ ID NO: 301088 - DNA, 381 bp, Glycine max
agctttgttctttttataaaatgagaagctctggactcattacgttatctaaaaatcttggggtggatccaagtgctccgatcatccatttgcatactcatgtttggcggcatactcaccgttgttcatttctttacgaattccatcataactaagaaaacaccaaggcacccctataacactcgatccagaaaaatggataatgaagagggcgtgcacgaacagatgaaggccgatctatcggccttaaaagatcaaatggcttccatctcggaggtcatgttcaaactccacaaaaccatatatgataaagccaccgcaaccgcctcagtacagctagggaagcggagccgtgctgaacccgccttaatccgggcctaa

SEQ ID NO: 301089 - DNA, 439 bp, Glycine max
  unsure (1)..(439): unsure at all n locations
cttgaacatacgaccttgtaaaaattaatgggaattggtttctacgatgtttgagcttaaatttttacttcattttctataaatctggaaaacaattataaaaaagaaccaagtgatttagataaaagaaaaaaatatgaaaaatcacacaagttggcaggaaaatcagtgtctaggaaaaaaaagtgaaagggaagtgtgaaaacaagtgccaaaactagaggtttcttgagtcttatttttcttttagtttttttactctactctagagccattttaggtttccctttgagtcctagcttgcttttatgtgcttttcattgctttaattgttgaataatccttgaaaatgtcttgttaaaactttattggtttagctctcatttcattctttntggnctttggntattgcttgtctctttgttttcttggttgtgag

SEQ ID NO: 301090 - DNA, 271 bp, Glycine max
  unsure (1)..(271): unsure at all n locations
agcttcttcttatagtccacctttgcttgaccttctttatgcttaaaaatagaaacattacgcaaaagatcaagaggagttagtgggttaaaaccataaacaacttcaaaaggagaacaattagtggtgctatgaacaactctattgtaagcaaattcaacatggggtaaacaagctctccaagtttttaagttattcctcanaactgtcctaagcacagttcccaaagtcctattaacaaccttccgttgcccatcggtttgtgggtgac

SEQ ID NO: 301091 - DNA, 406 bp, Glycine max
  unsure (1)..(406): unsure at all n locations
gtggtcttcggcatcacattttaacttgatccatcggcgataagtaccgtggcgacgacatggtccatacatctcaccgacacatgtagagccttgttgtgtcctctcccctcaacgggaatctcttctttcgcaaacacgatataattgttggcggttatatgattaacgatgccttcgaaaccctccactgagatatcatgtgctacatgggcatcgataaggacctttatcaacagcgcacgatgaggctcggagtttatgagcagatcaagcatagagatccttgttggagttttattcaattgctcgactaccttaaactcgctatgctggatgaggcagaggaactcatgggcctcttncaaagtcacggtctttccttgaagacctctttcttttcaag

SEQ ID NO: 301092 - DNA, 200 bp, Glycine max
ttaagtttgtttgaaggacaggttctcattatacaaagcttgcaggaactacttcactccagaccaattatgggtgtagagcagttcgttgagaacgtggcctgcccaggagcccgaccttgtttcgtggcggataatgaaagttctacagcccaggcaactcagaaacatgagccagaaccagaaaatgatcactcatc

SEQ ID NO: 301093 - DNA, 427 bp, Glycine max
tgcttctacattctctcttgaagagaaggatattacttttgaagtccatagagaaactcttaatggatttgcaagtgtttgcccaagagtttcttttgagagagcatttggcaatgaatttctctggaatatctctctcatttccttttgagaggataatacattttgaacaagcaaaactctctctttaaaattcgtgcccaagttacctatttgtaggcctttgatggccattcacaaattcaatcaaaagatatgactgttggcagattttctgaaaactctccattggtaatcgattacacagttataatttgaagggttatgaattttgaatttgaatttccaaagttcctttgctggtaatcgattacaaacatatggtaatcaattacatgttcaaaattcaaaattgaaaacccttttc

SEQ ID NO: 301094 - DNA, 251 bp, Glycine max
agcttgtttacaaaaacctatttggtttcgattagcttatgagaagaaagtttagggactaaatcccatacttcattccttttaaactgatttaattcttcatgcaaagccaacaaccaatgctcatcatgtagtgcttcacatcttcatcttccacagcattttcttgaacaagagagttagttccatcacaaacaacatgtacatattcttccacacataatgttcttctattaaacactctatatgcc

SEQ ID NO: 301095 - DNA, 426 bp, Glycine max
ggaaagaggaaagcataatcatttcttataagacatttaaaaaagagacaagaggtagagtttcaacggatgagacgaaaaccagcttaatttacaatacgattttcagtattttataatttgtagcagtaccacctattagggttggggtgtgggcatattctcatagacagaaaatgggtgacatacgcatgatatgataagcttacattacgcaagtaatttttttttatatatattaattatagtatttcgtaaaatgcgctgtgcttttctttttataacttttagggtacgaaaatacctttgtttaagtgcacactagctataccaaaaaattacgatagtaaaatgtgtgttttattaaaaagtacgatagtaaaatttattaacggatatatgagcatagtcttttatttaataaaa

SEQ ID NO: 301096 - DNA, 273 bp, Glycine max
ttctgtttatactaaatatatatgattgttttatatatagattaagtttaaaatacattagacttataagatgggtttcaaaagtattaatagaatgaaattttaattagcatgttacgtcaagttaattacggtattgaaaacaaaaaaaatgtaaacattcccatagtgcgcaagttaattacggcggccactttatttttaactttgcatgttgtttccatatataatgaaacacattaatttgaaaatgtgcatggaggagagttgttt

SEQ ID NO: 301097 - DNA, 427 bp, Glycine max
  unsure (1)..(427): unsure at all n locations
tccttattntgtaaaaacacttcctttgaaaaatttgttcttgcccaactcttttcttccattgttcctccacttccttgcttttggatgctattcatggagatgggtagccaaaccctccgttgttggggttagatgtatccgaaccatatgctctcatgtatttttttgaaatagtgttatatattcctcttattcttcaatgttagctttttacttctatgcttcatgcttgttatgattcggccactcatagcttgattcttggatgagtttgctattggaaaatactttctttatcttgaattgtggtaaaaggctcattaaaccttggagctaggaataaggtgagaggtaatggttatctttgggtcattgagcttaaaccaagttcctttgttaaatgttcaagggattgacatttaat

SEQ ID NO: 301098 - DNA, 347 bp, Glycine max
agcttaatacccaaaatgacatctataggaccaaggtcctttatatcaaaattactagacaagaaagacttcacatcatttatgaaatgtatattactatcaaatatcattatgtcatctgcatacaaacataaaatgacacatccaatatcatcaaattgtttcacatacacacatttacaactattattgatttgaaaaccatatgaaagaacaacttgatcaaacttttcatgtcattgctttggagcttgtttcacaccacataaaaatttacaaagtttgtaaactctcttttctttacccgattctacaaaaccttacgttagctcatactaaattcttct

SEQ ID NO: 301099 - DNA, 159 bp, Glycine max
tcaagcttttggtacaaagattaagaacaagttcaaagagatttatggcttgtaaaagattgattgaataagtgttcaagatacttggaatgcaaaacaaagccttgcttttatagactcttcatgtctggccaagacaaccattagaagagttatgac

SEQ ID NO: 301100 - DNA, 411 bp, Glycine max
  unsure (1)..(411): unsure at all n locations
tcagaccaaagcattctanaatctatgtatctaaaattcctcaatttagtggatttcaaggtttgagaagtgaaaatgagaatggggtaaatttggagcaaactctcacctcacacaagtctataaccttaatctaaacttgctcaaactggttttacgcctaaaattccaccgaatcaaaatttgactcctcaacacccagtttaccctagaaatggctcttgccttcactttggtcattcatttttctcctttgcacagcccaagctttcccatagtcctaaatgacatttcaaactatgattaactccctttaacctccaattactaacaaatccagatttaacctttcaaactctcaaagcatcacttttttccactcatagcactacattctcactttctaaccct

SEQ ID NO: 301101 - DNA, 164 bp, Glycine max
agctctgatgtttgtgttgaatgcattaaaggtaagctgaccaaaagcaagaaattaagtgcatatagagctacaaacgtcttggaattgatacatacggacatttgtgggacattccatacaccgttatggaatggtcaacaatatgttatatcatgcataga

SEQ ID NO: 301102 - DNA, 418 bp, Glycine max
  unsure (1)..(418): unsure at all n locations
tgcctcanagaggtccaggaaggacaaggcggccgaatgaactagttccgccccggagtacgacagtcaccgctttaggagcgttgtacaccagcagcgcttcgaagccatcaagggatggtcgtttctccgggagcgacgcgtccagctcagggacgacgagtatactgatttccaggaggaaataaggcgccggcggtgggcaccattggttactcccatggccaagtttgatccagaaatagtccttgagttttatgccaatgcttggccaatagaggagggcgtgcgtgacatgagatcctgtgttaggggtcagtggatcccgttcgatgccgacgctatcagccagctcctgggatatccgatggtattggaagagggccaggaatgcgagtatggccagaggaggaaccgg

SEQ ID NO: 301103 - DNA, 303 bp, Glycine max
  unsure (1)..(303): unsure at all n locations
agcttcgcacatgataatggagacacatgaacagcgctaggcaatgacattcatggtgctccgaacaaaggcggagtatggaggattggcttgagggtccacacttaggcaattatgaaactcagctccaaactcgaaagtggaggacacacgaacaaccctaagcaagaacattcatgtggctccgaacaaggacgagaatggaggattgccttgagggtcctctcttatgcaatcatgaaacacagctncatactcaaaagtggaggacacacgaacagccctaagcaagaacattcatgt

SEQ ID NO: 301104 - DNA, 437 bp, Glycine max
tatgctgcaaacatttataatagaccctctcagtagcttaaccaacatcagtagaataattatgatctttcaagcaacagatacaatccaggttggaggaatcatccaaatctgagatggacaagtcctccataacaataacagcatgtccctcccttccagaatgctgctggtcctagcaagccatatgttcctcctccaatgcagcaacaacaaagacaacaagcaactgaggcccctccttaaccttccttagaagagttagtgaggcaaatgtccatccagaatatgaaatttcagcaacagacaagagcctccattcagagtctgacaaatcagatggggcagatggctactcagttaaaccaagcttagtcccaaaattctgacaaactgccttcacaaactatgcagaatctgaaaaatgtgagtgtcat

SEQ ID NO: 301105 - DNA, 435 bp, Glycine max
  unsure (1)..(435): unsure at all n locations
cttgaaggcgtgtagctgatgtgccatcatcttcttctattttctaaattctttttgcaccattntaattattgattggtcttaattgtcaattaattacgcagttttattatttgggcccattcagctaatttgatgtttttaatctaatttcacgaattaatgaagcattgggcttgaatctagaattgggcttggacttgaagagggcagtctaatttaaaattagatcttatcttatctagatattatttagatttgatctcatctagatattatttcatctagatcttatcttatcttatcttatctagatttgatttgattttacttatgggcttggatttaaaacatatttgtaagctttggggctgaaaaaaactatataacagcaccaaggttctagtttaggggactccctctctccctcgcggg

SEQ ID NO: 301106 - DNA, 272 bp, Glycine max
agcttccatttagtggtaattagagcacaagagcttgaagtaggtgctccttaaacctccattaattttttgctttaccttctcttccattgttgcttcttcattttttctccatgtatctcctcacatgtcttgtgctaaatgttgttaacatgagtctttatagtttccaccgattaaacttgctatagaagctagatttgattttctatggctcacatttcttgttctttgtcttgaaccatgacttgtgctgagtctaggttcctttg

SEQ ID NO: 301107 - DNA, 440 bp, Glycine max
  unsure (1)..(440): unsure at all n locations
ttaacatanaacttcatttcattcatacctcaccttattcatgtgcttgagtgcattattcatgagagaaattacaggtgccaaaagggagagacataaaaacaaaaaaggtattgtgaaagggagagatggagataattcaatgtgagaaagaagtggagagacatggattagtttattttctttttaaggtcttttctaaaagttaatttccttttaatggatgcgatgacatgtcaatatagataaatttcattggatgtttatgtaaatagattttataatgtcaatgcatatatattatgagttaatggtcatgcacaagcataaagtaaatttatcttatcatctaattacaaattattgtttagatgattcttaagataattattgtaaaagtcaataaacttatcgtacatgatcatttgtaattaaataac

SEQ ID NO: 301108 - DNA, 334 bp, Glycine max
agcttgaatatttacaatatcttgctcgctgtctcaacgaatgctcctgttctctccacggaagcaactataacgtggcaatggtataaattgcttaagggagaaaatcttattggaaaacatttcaaccatcctccggatgatccatatggttcttggtatggaaactttacggtgccccttgaaaacccattcccagccaaaactaaaccagattccttaaaaatgagttctaaaggctcatctgatgatgacattgctgggtctgaggatgcgagtccgacaagtcacgacagatacacaacttcaatgaatcgctctgctggaaatgatc

SEQ ID NO: 301109 - DNA, 420 bp, Glycine max
gctactatggtcaaaggaaaaaaatcaacgaaatcaaaacatttgttgtggcattgtgcctgctgcaatttaagggagatgagaaatgaggcttatgatgggcaaaaatgacttcaacattctaagattatctgccttgggcttgatgtacgataagccatagatagtgatctgccttgttttcttgggcttgatgttagcctatttaaaaaatgaataagctgcaaaaccaattggagaaagtcaagtctcttactcaagatcttgaagaagggcttgagtttctatttaagcgtgtgataatgattggacttgcctttcttattcccttaaaacactaacaagtacccttaaataactacactgcccctcaaataccaacattatactaactactgttcagcttcccaaaatttatat

SEQ ID NO: 301110 - DNA, 313 bp, Glycine max
agcttttattattgacatcagggttgaagctaattaaattctatttgtttgtagaggggtatatggctacacctttgagcatgatgtatttatttttttaacttggtgttatttttttagttttactatgttagcagtttttgttgttcttgattgatgcccctttgtcaccttatgaattcttgtattataattgtcacaacctacctcacgacaggatggcgaagaccaaatagataagccaaagcgttcgtcttcaagggagaaaatgagcggagtcgccaccaacgtttattcgacaacaaaatgttac

SEQ ID NO: 301111 - DNA, 427 bp, Glycine max
tctgatcacctggagcacctccaaatcgcattacatactcttgcttacaatagtttcgttttaaaactgtctaaatgctcattcgcgacccagcaggtggattacttgggtcatctggtctctgtgaagggagtagaacgagtaccggaaaaggtcatagctgtgcaacaatggccgactcccaattccactcgtgccttaaggggattcttaggcttatccggattctatcggcgtttcattaggggatacgccaccctcgcggctcccctcacagctctcttggccaaggacaaattcaattggaaccctgaggctgatcgtgcctttcatcttctcaaagatgctctgtgtcaagctcccgtgctgcgattacctgactttaattccgaatttgtgattgagactgatgcctcgggaattggta

SEQ ID NO: 301112 - DNA, 202 bp, Glycine max
  unsure (1)..(202): unsure at all n locations
agcttacattattaccaaattaaagctagatagatctagtttactgatttactacttgcaaaccaattgcttaatgttgtgaactgttaaaagcgttatcaatggcggcacataaaagctccatgacacaaccacttggagcattttctttatcctatctttactctatcgcgtagntgattaagtattaagttccatgaca

SEQ ID NO: 301113 - DNA, 438 bp, Glycine max
  unsure (1)..(438): unsure at all n locations
actcacgcttttatncacacagttcataccacctgttatcaaaccaatatagcatctagtttccccaccccccctaagtctcactttttaatctatataaacaccaaaactcacacttacttgtagtcatagtagcaagttcaactactgatatcatatcacaaaacaatgaaggattattagggaagtttgattagttcgaaactgcagcaatttattggaaaaaaaacaagcttgcaaatacctagtcacataaaaacatttattgaaaaaaaaaacaagcttgcaaaagctcataaaaatgagaaaagaagcaaacatgtaccttgcgttgatgtcagactccaacggaggatgctcaacctcgcaatagtgacaaaccccaacggcggtcataaaccctaacggcaatgatggtgaggaggagacgaccatgat

SEQ ID NO: 301114 - DNA, 223 bp, Glycine max
  unsure (1)..(223): unsure at all n locations
agcttttatcattagtttacttctgagttgtgtaaacttggctttcttcaatggttttgtcggtaaatcagcaagattatcttctgatttgcagtagatgagcttgatttttnctttgtcaactttgtccgtgataaaatgatacctagtatcaatgtgcttgttgctcccatgatctacagggttcttagcacgactgattgctgacttattatcaatcagt

SEQ ID NO: 301115 - DNA, 437 bp, Glycine max
ccgcttgaagttgaagaaactaaagtttgtggctgcaatgaataagtcgtagaacatggatccaacaatgatggtgaagaacctggttataagcaacattaccattgttacctaaaaccgaagagggccattggggccaaagacccattggaagcactttcagagaaggaggcattgctattccaggccaatgaagaaaaggaaaatgcaaagaagaggccaccctcatgaatgagaaaattgcttggcttcagagagaaaagaacttcaactccaaactccatcagctgaaaaacatgctggaagaagtggtacagggactgagtaccatgttaagtgaattaagtgcaatcgccccctaattcatactaggtttaattccatattttgtcccttgcttttgtaaccattttgccaattctattacaacgtttttt

SEQ ID NO: 301116 - DNA, 239 bp, Glycine max
tcaagccttgcagatgttaagggaactgatgggagaaccacgttgctccatttcgctgctcacgagattgttcgttctgaaggaatccgagtctcagacagcattatggcgaaaatccgccacagaagtacgaccagaacggacgaagagaccgaacaacattaccaaacgatgggactacaacttgtttctggtctcagcactgagctatacaacgtgaataaaacagctaccattga

SEQ ID NO: 301117 - DNA, 421 bp, Glycine max
  unsure (1)..(421): unsure at all n locations
atcgtttgattgcgggatatcctactatgcccttttctactaacgtaacaactgtgtacaaacgatgcggacagatcttcatagcggttgctcttgctggactcacatcagaccttgacgcaattcgcaatcagatattatcgagtgctacggctcccacctatgacttagttcatgagcggctgctgtgtctctccattccacataccttcggacccttttccacttctactggggattcctctgcctttgtctctcactcctatcatcatggacgacgtggtgatggtcgaggtatacactgccactactgcatgaactgtgttcatgctgaagaagactgtcacactcaagcaagacacttgtctcgatgagttaatgtggcccacgngaccaccttcgctcagagatcactatctct

SEQ ID NO: 301118 - DNA, 365 bp, Glycine max
tgacattcccataatgtatcgcctaacattccacttgtgatctgagtgatcccacttctcctaaaggttgctatattcataggtactacaatctgtacgagaacagggcttctcaatccttgatgccaggcctacatccatgcactcaagacccatttgcatgttctctctccagtaccttgaacttcgaccattaacaactggaaccgaatctacattatcatatgcagaagccacccgcgaccaacaccacccccaaacatacacaaacctccataccattcatcaatgcatctacataatgatatatctcatgccacggatgtcactgcaccacttatatgacgtcttcggacagggacccc

SEQ ID NO: 301119 - DNA, 440 bp, Glycine max
aacactcccgcttgtgagtgacactaattagaagttgagataagcgcatttgagtttgattattggcaatcggaatctggcattagttgctatctaagttagagaatctcatacgaaatccataaataggacccattatctgcttttaaacttgggtaggtggtcttagatggagacgcacttctttagataccttattctcaatccctatgaagcaatgggtttgaataagaagtatatggaggcgaattcctttcaaacatagatcagggctaagtatatataatttaaagaacactactaggctattgaatgtcaaacccacgtcatgattaactcctacatgattgatgttttcggccgcctgaatagttgaattataacaaatatcctgtaactttgacatattgttatatatacatgcaactcctttctcccaa

SEQ ID NO: 301120 - DNA, 251 bp, Glycine max
tctatcttgttacaactagtattctttgccctaccaagccactgttgactctaacatacatcacaagacctgttgatctgattgcaaaatgactaacactctatcatattacagacacataaacaatttcaacacttactcttttctctcaaaatgagcacagtgtttcgagagactatatgaactttacaagaatccacatagagagctttttacgaacagaatttgaataatgagcgctccaattcata

SEQ ID NO: 301121 - DNA, 417 bp, Glycine max
tcttatccaaggcttatcttggttgtgaactccttcttccatggcttattccctagtggatggtgcctcctctcacctcttctcatttgtcttccgctgcatctccatggtggaaaatcaccattataggacctcattgaagctgaaagatccagcctccatagaagccccacaagcaagcttccatcacaacctttccatcctatgtagagatcaatgatattgaataacccaacaaaaatattagatggcttacagagatgcaaaacataacatatatttgacatatgatcttataacatgctatgattttggatttttactacctaacacatcttgaatcttgtcacctaagtacatcaactaaagtgcttgatatcttttataaagtaaaccatcgatacataaatataatat

SEQ ID NO: 301122 - DNA, 207 bp, Glycine max
agcttaagagatagttagatcaaagagcacttagagaaacaatttgtgagacctagtgtagcgtgtcaccctgcggagtgtcggtgttgttagtcaagaagaaggatgcgaccataaagctatgtgtagactatcgtcagctaaacaaggtggcgattaacaataggcaccctctgcctagtatagatgacctgatggactacttag

SEQ ID NO: 301123 - DNA, 419 bp, Glycine max
ttatatgattatgatcatgtaacttatcaaagaaacctaccttgatgcatgcatttttgttctgaaacgaaactaaagaaacaaaggaaagggagaaaatagaaagctaagttctaagatacaaaatgcccaaggcatttgtcggggaattcgaggggagtaaacaccagacaaatttacaccaatgagccatgagcaaccacataagggaatttaacaccacactttaacccaaaaccttaaggctcaagtttatgggtcttctccttacttatatggtgctcaacttttcaacttccatcctatgtgtgctcaacttttatgggagcaaaagaagaagctccatgctttgtcatccagtcagcacagtcaatggggattcatcttcataacttttgagaagataaaaagaaactctg

SEQ ID NO: 301124 - DNA, 183 bp, Glycine max
ctgcttcgtaaccttcgtgtccatatttacatctctgctattctctagttgcgtgactcatattatatgggtactacccgtagcatctcttttactttgatgcctatgatctattgcacatatcgctgggacgtctatgtccgatatgattaaccgttgcccttcatgggatgggagcttgac

SEQ ID NO: 301125 - DNA, 420 bp, Glycine max
  unsure (1)..(420): unsure at all n locations
tcagctntgtccccaaggcttcatgtagactcgtccttaatcgcgaagtgaacctcggatccctgtcagatacaatactagaaggaatttcatgcaaccttactacttccttgatgtacaactccacgagtctctccattctatacttcatattcactgggataaaatgagcagatttggtgagtcgatctactatgacccacacagcatcatgtccacgactagtcttgggtaaactagatacaaaatccatagatatgctctcccatttccattccggaatctccaatggcttcaattctcccgatggtcgttggtgctcaaccttagccttttgacaggtcaaacatcttgctacatattcggctacatctttcttcatgccatgccaccaaaaacttctcttcaaatcttggtaca

SEQ ID NO: 301126 - DNA, 351 bp, Glycine max
  unsure (1)..(351): unsure at all n locations
agcttgcttcagtataataggaagcaccaatataaatatgttgatgcctactattgatatatagcattgaccatacatgatactagctagagagaatagaaactattgataatagtacactccataggtagtaaaccacaaaaaactttagtggcttgcataactttagttaaatttagcggctnttaatgcttatcctatatatattataatgacataagtatttctaacttgttacctcctaagagattccctttggagtccttactggtnntgtaatcttttaactgaaacattgcattttggccatgacgttgatacaccgttgactattttttataagctaacatt

SEQ ID NO: 301127 - DNA, 426 bp, Glycine max
  unsure (1)..(426): unsure at all n locations
tctccccaattntctataaatagggggagaagtgatgttataatgattcagccctcctggtaattcagaatcacttaaaattagtgagaaaaattagttccgtgaagaaaatccaagccgaggcgcttccgtaacgtttccgttggtgatttcgcgaaggttttcgatcgttcttcgacgttcttcattcgttcttcggtcttcaaccggtaagttccctagatcgaacttttcaattcattctatgcacccttagtggtcctcatttgtttttacgtgctttcatttacattttatttactttccgtacccctttttgacgtgctttagtcatttgcttaagttattttctcgcctaatcaaaaaataaaataaatttccaccgatcatttgaatcgtaatatcccgtgatttctgttaaaatga

SEQ ID NO: 301128 - DNA, 234 bp, Glycine max
agcttccctctttcaccaaaagaccaaattagatctcaagcttccaccaatactgctctgaaacaattgacaccatatatagtccctactattctctacttgcatgactcatattatttgggttctacccataagatccaatttactttgaatcttctgatcaatctgttatagtggtgtgaggtatatatccgttatgatcaattgcttcaaagcattgaaggggagcttgag

SEQ ID NO: 301129 - DNA, 420 bp, Glycine max
  unsure (1)..(420): unsure at all n locations
tggtgtagtatctgttcaaatgtttaaganttatggagaccgaagccccgaggatataggtcaccggatagtgacatcagcagcatcaacagggaaacatatgtcaaggtatatttgtagtatctctttctctatctataaccacagaaacactaacgcagtgttgactacttctagggttattttgagaattttgccaattgaagtctcatgttatgcttcaaaggaggaaatttcaagaacaatcaagcctcttgtggaacagtactttcctgtggaaactcaaaatccactcaaggtaatactatctattagtgtttcagtttgtattacattttatttttagcatgcattccacactacacaaatgttttcaatgttaatattatgaaattaatatagctgggtacgtatatttat

SEQ ID NO: 301130 - DNA, 280 bp, Glycine max
agcttttatgttgtaattatttcttattttggattgttgaaccgtacaagcgatatcctttccaataaaaatctatgtgtatatatgtgtgatgtgccaacgcgtcggagtggccacgactcgagagctctatggtatgtaattcattcatgaaagaaaatgagttaacagtgcagtgattattttatgactgtatgatatacgagaaaatgatcatgaaagaaaatacattataccacttacctaattttatgtatatatttatacatttaatttcatg

SEQ ID NO: 301131 - DNA, 432 bp, Glycine max
cgttgttggtggtgatattattgacgagtccttcaaagccttctacagaaatatcttgggccacatgagcttcgttcaagacctttaccagcaaagcccgatgaggctcagagctcatgagtaattccaaaagagagaccctggctggggttttgttgagttgttcaatgaccttgaactcactctgctgaataatgcggagaaactcgcttgcttcctctagcgacacttccttcttgccacaaccatcccttttctctggaagacctttcactggaatatcctcgttcggagtgagggtcgtcttgtcattgtgctcttccaccatattttcctttcccttaacatttgcgggtcgtgttggcaggtcggggggtgcaaacacgcgaccgctgcgggtcacaccgctcagccccgtgatattggttacct

SEQ ID NO: 301132 - DNA, 386 bp, Glycine max
  unsure (1)..(386): unsure at all n locations
agcttctttgagaaaacttccttgagaagctagagcttagctacacacacccctctcataactaagctcacctccttgagaagcttccttaagaagattccttaagaagctagagcttagctacacatacctctataatagctaagctcacctccttgagatgagaagctagagcttagctacacaccccctataatagctaagctcacccccatgacaaacaacatgaaaataacacacaaaagtccttattacaaagacaactcanaatgccccgaaatacaaggctaanaccctatactactagaatggccaaaatacaacgcctagacgaaggaatannctattctaactattacaaagataagcgggctcatacttagccc

SEQ ID NO: 301133 - DNA, 409 bp, Glycine max
  unsure (1)..(409): unsure at all n locations
aaaaactaaggtagttcctaaacttaaaccaattgaggaaacttcgccaaagatccccattgagaaacctttattcaaacctttcaaagttagtgagaaggctaaaagaaaaattagggaacttagaaaaactaaatccttaattgaaggcgtaggtgacaaccatagtgaattactaaacaagattggtagtttacttaaagtcattcccgataccccccaagcctcggaaaatacttccaaaatggtaacaagaagtatctccaaattaatcaatgttattaatgaagatagtgaccaaaactcagataacacaactgagataggatcagtgtcagagaagaatataaacccaattaattccaaacactggaagacaccctncaaattatattatcaacgtccaact

SEQ ID NO: 301134 - DNA, 326 bp, Glycine max
  unsure (1)..(326): unsure at all n locations
agctttaatttattatgttatggtaaccccactcagaacccatcaaacattaattgtattggattatagtttgcaaaccatggtttggccccaccaaaagcaacgctttttcacttctacttactcaaaatatgatttgagacccanaaatgatgttcatatttgcttatcatgttatttgtggatgaaacttatattgcactctccatactacggtttgcggtatacaattacaaacagacaataatacaagttcatgtaaaatcattacaaggcgttgcatgcaattcactagtgaaagcacgaatgaacaccctcttgaaaat

SEQ ID NO: 301135 - DNA, 413 bp, Glycine max
tgtaatgttgttgaatgacaaacctgcttgttccaaaagcgagcaatatgttgatgcaccttcaatacttcattcttatccattgactctcttatgttcatttgcctcagcatctccatttttctccgattgattgcattttctggattcttacagaatttgtccattggtccttttttagtcccacactttgtctttgcacttgcagcagcattacaagagtccgcaaactcatcttcttcacttccatcacatccaatcggttcaccaaattcaaaatctcttatatttgccatattaccactgccagaagtactgtaagtggtcccacttttttttgtagccatatattccttcaactcttcgattacatttgggggagttttcttgcaagctgcaacgttgcccaactt

SEQ ID NO: 301136 - DNA, 209 bp, Glycine max
  unsure (1)..(209): unsure at all n locations
agctttgaccaaaccccagcagtagttgttgccttagagacttacctcaacaccttgtctccgagactgaggataattgcactgtgtgccttctacagtagtgttttcttatccgcatcagccatcatcttttttgagtttggcttctccatcaagtgcttctaccaggcccctgtgaacaagaaaggctntcatcttcaattgccata

SEQ ID NO: 301137 - DNA, 429 bp, Glycine max
tgccggcgataagctcgtcgattccgattactccctttcgatccgctccaactgggtctcctccatggtggacttcgtgtggcggaagcgccgcgccctcatggcgcgctccttgatcctccccgtcgagaatttccgcgccaccgtgttccccgtcgtatactccgtcaaggccgtggcctccggtggcgtcgaggtcattagaaaactctccaaggcttcctctacctctgcatccaatgcggatgctgaggttgattcccacgcggagaagctggtgggggtttctgatgtgctcactcacctggctccgttccttgtttcgtcgttggagccggcgttgatctacgaggttgggatcaatatgttgtatctggctgatgtgcctggagggaagcctgaatgggcctcacaatcgatcattgctat

SEQ ID NO: 301138 - DNA, 322 bp, Glycine max
  unsure (1)..(322): unsure at all n locations
taagctttccaacgggcatcgcttcatgttagtgaccgttgattacttcaccaagtgggaggaagcagcttcatatgctagcgtgactaggaatgtggtgatcagattcattaagaaggagataatctgcagatatgggttgcccaagaagatcatcactgataatgccaccaatttaaacaacattatgatgaaggaaatgtgtgaggatttcaaaatccaacaccataatttcacgccttattagccaaagatgaatggngcagttgaggctaccaataaaaacatcaagagaatcatccagacgatgactatgtcatac

SEQ ID NO: 301139 - DNA, 415 bp, Glycine max
  unsure (1)..(415): unsure at all n locations
tggttcgaggtacttacccgttgaagatcgaagaacgttgaagaacgaatgaagaacggttgaaacctttgcgagattcctcacggaaaacgttacggaaacgtttcggaagtgcctcggcttagattttcttcacggaaacaatttttccaagcaaattcgaaggagagagaagtgcctaaggggctggacccctttcttcttcatttcctcccctatttatagcaaaataggggaggtggttgccgcccagctcgcccaggcgagctcagctcgcccaggcgagcagggttgcttcctccagaagcaaccgccttctggaggaatattccagagggcccaagtgggcctgggtgctatttgcacccncatctttactaagtacacccncctctgctgtttttgggtgattctt

SEQ ID NO: 301140 - DNA, 392 bp, Glycine max
taagcttatgcacggaaaatgtaattatgaaattgagatgcccgaagaaacaccatttcctagttaaccatgcattaggtaccatgttcaattattttgtttttaagtgaaacgggtttatgatcccaacatggttggctcgtggtgcctaacacatgaaactaagaatgtagtgtgaagtttcacgcttcccccttttttgtttttgttttgtagaggaaaacgcaaggatgagcaaacatatgcaattctgcagaccacacagtttgttgaacgcatatgcatgatgatgccatgaccatgcaaaatgtgaggctggaatatgataacgggacaatgcacgatatgtccattatgattgtatgaagagatgcttatgcgatgcttgatat

SEQ ID NO: 301141 - DNA, 380 bp, Glycine max
tgcttcaagtctaaaatgccctaagaatatattgttgtaaatggggcctttatctgtacaacaactttttgaaaaagttgaaagtatgccaattgtacttgacaagtctgagttcattctaaagatctccattctaaagaataattcttattagcttctgaaggtatattagaattgcattctgatgttgccattctgatgattagtttctgattagctttctgatggtctctcaaatacattttgatgttactgaggaaggatttcttctaatatacgttcctttcgatgaagataacatgatatgacaatgcagatagctcatctccatcaaaccaaacacttcatttaacatagatgattctgaagtagcatacttt

SEQ ID NO: 301142 - DNA, 232 bp, Glycine max
  unsure (1)..(232): unsure at all n locations
tctagcttggttttgggcaataacaccgggcctgacgtacccaaggtctcctgacccccgcgacatatctccaggcaccactttgcggtcaacaaacaaaagtaggaagactgactcttacacgctatttgacatcaagcctcatctgatgatcgcgggcacccggcatatgtggtactacgtggcgatagcgcgatggcgcaactcaactctcccgnttcacgagtcaaac

SEQ ID NO: 301143 - DNA, 427 bp, Glycine max; identical to SEQ ID NO: 301053

SEQ ID NO: 301144 - DNA, 315 bp, Glycine max
agcttatgttgatctcatatggtttgagcgtgcttgcaaattagagtgaccctgactggtctccctacgattttacctagtgagagtgacttgacttaccagtgtgtggtatgtcttgtcctacgcgtccgacaggatttttcactgacatggtaccacattgcatataggatcgagtcttagtatatttgttgcataacacttgtgtattgatcaatattgattgggtgagtgatatcgtgtcttgatccttaagtacgtgaatgatgcgaaaatatgtgacacgcgtaccgtcgagatatgatgttatgtgat

SEQ ID NO: 301145 - DNA, 493 bp, Glycine max
  unsure (1)..(493): unsure at all n locations
cgcgctgccgtgagacttcgtacaccgtgaaattcgtcacatctccngccagncacngacaanannattcaagtgagggacncgagttatgtctcttttatcacacaacatttcggggattattgtggaacatttcccgacacaagaatgtgcggtggttgggcatccatcctcaagcccatctccccagctatttgatgtaattcaagacagaggtgttagaaatcgacctggcctcttttctcatccatcggtccttcactatttagaacccaacacaatctctctttggctatcatgccacctagcgtcttttatcgatcgtatacgatccgtatagtggcttccatacaggccctaatactattctgattcccaatagcactattttctgtcacagtgcggactctgagcgcactaccttggctatccctaactgcctgcaacggtcctatacactgaacagctcaactcaggaacctgacccttctct

SEQ ID NO: 301146 - DNA, 248 bp, Glycine max
agcttgatggtacactaagcctcacatcttaggctaagcgcatatttcagaaaaaaatttggtgttgcagaaagctctaagcgcagcttgccgcgctaagccccaaatgcttacgggattttacaactttgagttgggcttagcgcgacgctaggctaagcgctagtgttttaaactcaaacttcacgttggcatgataagcccagctgagcgctttagcgcacatacgaatttcagtttttaaaatc

SEQ ID NO: 301147 - DNA, 407 bp, Glycine max
tgtcaatatagctcttctttgctttaaacttacttgtctttgattaaatttagacttagcctatagaacttgagagtgtaaatttaagcatagacttagtctatgcttaaattttcattgtggctgaacaactgaaaatatgtcacaatgaaaatttaagcatagcgttgtgaatttaagcatagacttagtcgatgcatgatcctttttttctctgaataaccttagcataatgtttaatagcacattaatctgtgttaagctgcatttttcttataacatttgaagggtctggctacattgagcacatagatatactgatgtagtagacttcacctcactgggaagaccccataatctacgcaaaaataagtttgattctgcatttactatcccaggaggtaatc

SEQ ID NO: 301148 - DNA, 217 bp, Glycine max
agcttggagaaaaacttgaagatatcctgtctattacatacccaactcctttgagtgatatttgcattgattgttataatgaatgttgcatcttagcccatatcatatctctcgatcatcatgcctcatcaggagtaagcgacaaaaccatttctatagttagaacatgtctctctacaagacacacctctctgttttaattgactaccaccttatt

SEQ ID NO: 301149 - DNA, 418 bp, Glycine max
  unsure (1)..(418): unsure at all n locations
nttcgattcattctatgcacccatagaggtccacattgtgtttagtgcattntttctcgttttgtttactttttataccccctgttgacgtgcttaagccattttacttaagtcgtttctcgcttaacttaaaaataaaataaatttccaccgaacgtttgaattgtattatccattaactttggttaaaatcaattccgactgttcggtcgtgccgtaaccacgttggaaatcaaaaagaggtaaaaaataatataataatcaaaaagacatcttttagtgaaataaagcggaaaatcaattggacattttctctttgggatttctcattcttaatcgaattgattaataactaaagtgaaactaaaggctaaaatcaatccacctagtcaagctcgtccacaaaaataggcttttg

SEQ ID NO: 301150 - DNA, 272 bp, Glycine max
agctttccacccagctcacccaggcgagcagggctgcttcctccagaagcaacaaccttctggaggaatcttctggagggcccaagcgggcctggctgctatttgcacccccatttttactaaggacaccccccttttctattttttcgtaactctttttctgtaacgttacaaaactctacgaacttcgtaacgatacttatcttttcttctgcaggctacgaacccttacgacttatgtatttactcttttttactctcaaagaagttac

SEQ ID NO: 301151 - DNA, 511 bp, Glycine max
  unsure (1)..(511): unsure at all n locations
cctcctcaccacactatctccacaaatactaaacctctcttctcactatgttcaatntgtttcataattacgcccgcnctangatcctgtgactcactatacnccanatagaatagtannggggaccttagagtaacctgtagcagccacatatttctttaaattaacaaaaaatcctatgagcatatgaaaaaggcacccacacaaacagccctgtagcgactaatctaaattcacataacccaacaataaccaattatctgactcccctcccccctcaccgcaatacacggacacaacattgcctccaaaaaatatcactcaatcaataagcatctgaatcgcaaatttcctctagatactatcatctaacaccaataagttactcaaacaaaacttctaactcgatactagtactcacactaaatgaaaaactattaattcaacaattagatttaaaacatctaatctcacgaatcttaacaaaataatcttgatacccgagtccacc

SEQ ID NO: 301152 - DNA, 399 bp, Glycine max
  unsure (1)..(399): unsure at all n locations
agcttgcatgatttacatctccccctttctcaagcaaattcttctttatatcatcaaaatcttcatgatttacattctccccctttttgatgatgacaaccacctgtacgttaggagcaacaacaaagaaaatatctatttgcatatacccactccnccttggttttacaatgattgcttatatgagacaattgacagattcatatttttcatatataaaaagttgtctcataaaaaatagataatcttttcttattattttatcttttatctttctctccccctatgtcaacatcaaacacacatcatgaatagagaggagaacaatgttactacttgctgtaatgtatgagactcaagtgataccacaggcattacacaaatcattcaatattgatc

SEQ ID NO: 301153 - DNA, 410 bp, Glycine max
  unsure (1)..(410): unsure at all n locations
tgtaggccttggatcttcttcatcaaaggagtcctttgcttcttgaatatcaatggccgcggaatggacaagaagaggagttgagaggagatgccactccaaggacaagatgagtcaagaataatctcaccaccatggactctatttatcgcccaagtgtcacacaaaatcggagggaaatctgaatctctattcaaatttcacttgaatttcaaattgaatttntggagccaaaatttcactaattatgattagtgaatgttagctatggttcagcccactaatccaagatcaagcctacactcctccactaatatgcttacgtgtcatgaggcatgtaaagcatgattgatgtgcacaaagtgtgactatatgatgtggcaatggcgtgtagcatgcacatgctcacc

SEQ ID NO: 301154 - DNA, 375 bp, Glycine max
  unsure (1)..(375): unsure at all n locations
agcttcttgtagaggtggagggcgcanatggagtgttggaggagctcgatggtgcggtggaggttgaagagctgggtgtttttggtggcaatagagtagtgaatgttggagaactcggagcggaggtgacgaacggaggactatagtgccccagcacaaatctaaggtgtacaaactctatttaattattttcctttgtcctttgccttgaccgtcatcaagaccaataaaaaaatggtcctctccattctcgttgtcattcttaccatcgaaaacattgcaagcgaagaaccaccatcacaacaagcacgactcagatatgagaaccacacatatccagatatgagaaatagtgagaaccacatcaagatctta

SEQ ID NO: 301155 - DNA, 465 bp, Glycine max
  unsure (1)..(465): unsure at all n locations
tgccacccagctcgcctaagtgagctaagttgcttcctccatatagcacctggaggaacttcctggaaggcccaagtgggcccggcctttntttgctgattctttttccgtaatgttacggaactttacgaattccgtaacgatacttgttttccttccgtaatgttacggaaccttatggattacgtaatcatcccttttttggctttcggaatgttacggaacctcacacattgtgtaacaatgcttccttctgatttccggcatgttacgaaacttcacggatcgtgcaacactccctcttttgacttcggcacgttatggaactttacgtattgtgcaacaatgggtgccaagtacctcgaagcggtcaagatgcaatccaacctcncaagggcattggatagaagactccaagaagaatgagccccagatgcaagagaacgccctanggttctcatgacc

SEQ ID NO: 301156 - DNA, 356 bp, Glycine max
cgcttgtattactttgttcgcatattcacttatctctgtaggacatgctataaaggctcatcgcaaagttctatgactctatcttaaataaattataactttctagtatataacaatggcagaaagacagattgttcttgcctttgtttcctccccacactggccaaatcacgtgatgatggatattgacccgagtatatacattttggggcctaacgtcaaaaatatttatgggatctctcttttacaagaattttagagaaacttactatatcatataaaatatcaatctttctatccctctcttaatgttttcagctgcatattgcgacattggctaaataacataccttacg

SEQ ID NO: 301157 - DNA, 128 bp, Glycine max
tatagtattcacactggtaaatcatgaccactgtgtaaactgaatatcttacgaagtgctcgcgtgcagtagccctcatatctataaataatatgtggctgagaacaggggactctactcatcatgat

SEQ ID NO: 301158 - DNA, 388 bp, Glycine max
aaacaactatcttaatgagctattgatcaaaagacatcccacacaatacatgtccctcgctgtctgatgataacaacacacttgtacaacacgcacaaccactaaaaacatttttatcccgcctacctgccccaccgccgccgttacaattagacactatattactaccaaaaactaatacccacttacccagctattagaggcgaaacttctcctcaaaaaccattacttaaatataactaacttaatacaaattacaccccttagaccgaacatacagaccctaccacaaattgaagagaactatctccttatcacacaatagattaaaaatcattcgagccctacgaaccctaactcaaatgattcttcacactgcaatccaccc

SEQ ID NO: 301159 - DNA, 160 bp, Glycine max
  unsure (1)..(160): unsure at all n locations
aacttgaagcctgcatggcagaacaatctaacgctacacgcgcatccgaggaaatgatcttgacacttacccagctgacatctgaaactgacaattcaancccctaaccacaccatatgaataacaggacagcagaattaacgaaggaacttcaagataa

SEQ ID NO: 301160 - DNA, 412 bp, Glycine max
  unsure (1)..(412): unsure at all n locations
agcttcctatcaaataggttatatttaacctaactattattcagatatatttgaatatcttgcctattactaaatactaaattatctataacgtcatattatctacaaggtacgaatatcatcgtctacctttatttgtcattcaacgcacctctctaacattatatctaagccattggttattatctataacccatgaatcatctccccctacaaacaaggactagtacccttgctcattcactatctataaatataggttccatcaaatccatttacacgacctgctctcacacactcaacacacgacaacaaagtntgttcccctctctttcgcgcctgcgcgcacgcacgccacaccattatcaaatgtggttttgtcgtgcacaacaaaaaaaaataacacattatg

SEQ ID NO: 301161 - DNA, 223 bp, Glycine max
actaggaacattctatggagaggtcacgctggatccgaagaggtatgtggctgagatggcgggactagtacgcccgatggagaccagcctgcgggcactccttctacagccatacaccatacatgccgcgcaggatcgtatcatattacttgctgctagatacggtgcactcctgacgacatgcttgctcccgactaaggatatagagcctactctaaagtcc

SEQ ID NO: 301162 - DNA, 612 bp, Glycine max
  unsure (1)..(612): unsure at all n locations
ccgcactcaccatcctcgttactaccattgattgntaacgntntagtgagtccgaccaatacntaactacactatactatatctcacntannnntaaaaaccgccgcgcggagnngnttggtagtacatcntcgactactacagangaattctaacncgtacgcgaggatcctatagagtctacctgcacgcatgcatacttgtataaagatatatgtccgatctactatgcaacgatgaagggctttacaggatgaatcgacaacaccaataaagaatcgactgacgcaagctaactgatcaaataatacctgccacgtagagcaatagtagttaaattcccgccccccccgcacatcgcattgctgcaaatatggaggataaagctcagatattcggcccaataacataggaaacttaccatagcaatgtccaaccactggcttactaactccatctgtaccgcatacatgacacctccgctaaatctcgtttctatccacaaccgagtcataaccaagcgccaataatgcgccaccgtccgtacataacctcagtcttcgttatacaaagagacccaccctaacagcagacatccacagtctacaaccg

SEQ ID NO: 301163 - DNA, 494 bp, Glycine max
  unsure (1)..(494): unsure at all n locations
agccgcgcgcngggtgattcgtgcatgcaaacgtacattaaacatgccctgtgacataacgaggaagaggatctcttttggcatcttaacggaccctctgttgagggctgagagccaggcctctctatgcagatcattctcacggacagctacgctcagacaaactctgactgagatccgtcatgccataagagacgatactgccacttacagttttaatgcctcatgacatattgtaactccccaacatgcctaatctcaatgaccaccttacctaacttacttcggactatccgcatagaacgaacactttataggctgtcccaaccccaccccgacacactacatgctataatagttaanatcctaacataacataataatggacgatcaatacctctatatgaaaatcacccatgacaccccccggacaagcgatatatctatcgaacactggactcttactcacgaaacgccatggtgtcttccgaccg

SEQ ID NO: 301164 - DNA, 369 bp, Glycine max
agctctgatccaaaatcctgactcaccataaaccttgacccagggtgagaatgtcaattcttaccctcggaagcaaaataaaaaagggggagagggacaatttccaatcaaagaggaagcaaaaaaggagagaaggaaaattttcaccccacgaaaagaagagaggaaagggaatttccaatcaaagagtgcgagatagcaaaagaaaagaacgaaattcccaatcaaagatgggaaaagaataatgagaggaggagaaggaaagaaactcctgacaatgatcgacagaaacagagaaatggcagagagtctctgaccagacatatctgaacaatacagaattgtaccaatgaacaaaaaaagaaagga

SEQ ID NO: 301165 - DNA, 409 bp, Glycine max
tgcttgtggagcttctatggaggctggatctttgagcttcaatggggtcctttaatggtgattttccaccatggagatgcagcggaagataaaggaaaagaggtgagaggaggcgccatccattaaggaataagccatggaagaaggagcttcaccaccaagatgagccttggataagaagcttggagatgatgcttcaatggaggaaaagaaagagagaggggggagcacgacattgaaggaataaaagagggagagaagtggaactttgaagtgcgtctcataagaattctctcatcatagctgcacaagtgttacacatgcttctatttatagactacgtagcttccttgagaagcttctttgagaaaacttccttgacaagttacagcttagctacacacaccca

SEQ ID NO: 301166 - DNA, 206 bp, Glycine max
  unsure (1)..(206): unsure at all n locations
agcttactataacgagaggtgtgcatgaacatatcatgcgcttaatggacataatggctccactgaaaaccctgnaagttatcatgtctgaatccttcctggcacatttcattctgtgcaccctatctcaataatatacactcctttccctctcccacaacacacataatgataaatggtctattaatgaattgatgaccatgtgt

SEQ ID NO: 301167 - DNA, 368 bp, Glycine max
tgctccaaataccaacaattgtctcttactttgagaacttttacaatattcgatttccaagattcaagatgatggcactatgtgccttgtccaccattgtcttcctttatgcttcaaacattttgttctgaatagctttttctccacccaatatctgatcaagatcttgtgtaacaagcaacacctacatcttcaatctctatattccacaatcattttttcctgcgaatttctccacatcagactttgtagttgccataatcaccttgttgaaccaaccttttagatacaatcggccgccaacacttgtcacaatcacaactatttgattaacttcacccaaataaatcttactctatgataaaaaa

SEQ ID NO: 301168 - DNA, 373 bp, Glycine max
agctttgatccaaaatcctaactcaccataaaccttgacccagggtgagaatgtcaatccttaccctcggaagcaaaaaaagaaggaaaattttcaatcaaagagaaagcaaaaaaagagaaggaaaatttccaatcaaagaggcccacaccacagagagaaggaatatttccaatcaaaggaaaaaaaaaagacgaaatgaaattcccaatcaaagagtgggagaaagcgaatagataagaaagaacattcccaaccaaagagtgggagaaagtaataggaaggaaagaaagctcctgatcaaggatcgaaagaaatcagaagatatgtgcagaaaggtctttggaccggacaatatctgtacaatacagaa

SEQ ID NO: 301169 - DNA, 342 bp, Glycine max
  unsure (1)..(342): unsure at all n locations
tctggtgtgacatcttgacttgctttccaatctgacattcaccacagattatgccttcttctattttcagattgggaatgcctctaacagcacctttgtcaatgattttcttcatgcctcttaagagcagatgtccaaatctttgatgccatattttgacttcatcttctttggaggatagacatgtggaggagtaactggtttcttgaggtgtccatacgtaacacttgtcctttgatctgctgcccttcattagaacttcactcttctcattcgtcancaagcccctgactttgtgaagttacattgaatccttcatcacacaactgactgatgctgatc

SEQ ID NO: 301170 - DNA, 241 bp, Glycine max
agctttatggtgaatcaaacgtgattcaaaggtgttttgatgataacaatgatgataacaaatcgtgatgacaaaggtgatgacaaaaagctcaaagatcaatcaaagaacaactaaagtgaaccaagaacaattcaagagtccccatcagaatcaagatgagttcacgtctcaagaagaaagtctagagacaagaattaagattcaagggtcacagatctcaagaatcaagatcaagatt

SEQ ID NO: 301171 - DNA, 349 bp, Glycine max
tcaccactatctcttgatgttacaatagttgaccatgacggacttggtagcgtactcgacacgagagaatgacgttggtgagcacggggagcgaggatcgaacagtgctaactgatgcactactacaatttatgatataacgattgacggttaacatgagttattcacaaaagcgatgttaacaaaagcgcggaggcatcattgtagtaagaatacttactgaacatcagttacgtgcaagaacctttatgtcttctagacaaggtaagagttttacaaaaaatcctttctctcttatgacagaaccacaacactgagttgatgccagtgtcaataagtcatcttgatt

SEQ ID NO: 301172 - DNA, 411 bp, Glycine max
  unsure (1)..(411): unsure at all n locations
agcttgcgttctanatgatcgtatgctcgtttagctgcaaggaattttagtctttattctttgcgatcatttttttctattttttctaatttgctttttgcttgatcatttatgaggaaattagttgtgaaagataatgaatcaaaaactacatatataaaaaatgattttaaaaaattatctcaaaaaattaaagtcaaaacttttgacgacaataataaatatatatatatatatatatatatatatatatatatatatatatatatatatatatatatattatctatcatgatttatagtatattataataagactagaatatatattcttattacttcattcttctttaccaagagatataaaaatactctctattatttcattctttattactaaatgtacatact

SEQ ID NO: 301173 - DNA, 453 bp, Glycine max
tcagatactcttgcacatcagtggcagccatggttataagtccaatcagaaccttctttgaatctgcctgaatgagacactttgagagacagacatttccatatagactagccatagcctcaaggacacgctcttgaattagtttgttgtcctgaggctttaaaagagttactagaatatcctctatctgagttgcatcaaaatgtttctcatcaacatcaactttttcctcaaagaccatgagtgtataagcaagagcgccaattatatcaccaactggtgcctacggcgaggagaacggaaagttctccaagatatagtattaaagcagacatgccaccacagatattggctaaagctcgagttgcatgctcctgcagagcctggccaccatcaccttgcatacactcattagaaggagcaactatagcttccataacgattggaatacca

SEQ ID NO: 301174 - DNA, 414 bp, Glycine max
  unsure (1)..(414): unsure at all n locations
agcttgtaatgttcccccaatttatggttatttggagtaaattntgtaaataaatcttgttttatggttaacactgtctctagaacatttccattggatttaatgatggaatctatgcattttcaggtgaaaaagaggctaagttttgcacgcaaaaagtagcagttgggctaagcgcatatccaccgctaagcgtaaaggagaatctggcagagcatcaacatcaaagttgcgcgctaggcgcgagatcagtgtgctaagcgcagcaggtgccttcagccaggcttagcacaagactagcgctaagcctaattccacttactcgcgctaagcgcgagggtggcgctaagcgcaaggtcatgaattntgagcctatttaaagcctgttttgtgcaaaattagggtacagacaca

SEQ ID NO: 301175 - DNA, 448 bp, Glycine max
  unsure (1)..(448): unsure at all n locations
gcctcagcaaattccttatttccagaagggaattctatcaatagacctccaatctttaatggagagggttaccactactggaaaacccgaatgcaaatttttattgaggcaatagatctaaatatttgggaagccatagaaatagggccttatatacccaccacagtagaaagagttacaatagatggtagttcatcaagtgaaagcataactatagaaaaacctacagatagatggtctgaagaggatagaaaacgagtacaatacaacttanaagccaaaacctaataacatctgccctggaatggatgaatatttcanggtttcaaattgtaagagtgctaacgaaatgtgggacactcttcgattaacacatgaaggaactacaaatgttacatgatctcngataaatacactaactcatgagtatgaattatttagaatgaat

SEQ ID NO: 301176 - DNA, 149 bp, Glycine max
  unsure (1)..(149): unsure at all n locations
agcttattagtggaanaataattcaccccttcttaagttattgaggtcgctggtccaacattcgcaatatctaattctactcttaagttaagtaaaatgtagttttcaatacgtgagattatctgttttggttgatgcaagctgatgat

SEQ ID NO: 301177 - DNA, 103 bp, Glycine max
tattgtacaaattagtttgtaggacatagttgtgattcggacttgtcgcaacctacccttcggcgggagggcgacgcgagattcgcggttgcctcttccaaca

SEQ ID NO: 301178 - DNA, 466 bp, Glycine max
tggaggaagaaagagatgaatgaagggagaggaagagaagatatcgattttctgtgctctaaatgagctatgaaatctgaagtttaatattcaaatgatcaaagttgataaaaatgcacacacaatgcctctatttatagcctaagtgtcacacaaaattggagagaaattagaatttctattgaaaactcacttgaatttgtggagccaaactctggagccaaaatttctctaattatgattagtgaattatagctatggctcagcccactaaattcaagatcaagtccaagattcccactaactatgcttagtggcatgaagcatgtaaagcatgaagcacatgcacatagtgtgactatatgatgtggcaatgcggtgtagcaagcaaatgcttaccttccaattcaattaaatctatttttcaacacacacatcatatattcacttaatgcatgtgaaatta

SEQ ID NO: 301179 - DNA, 411 bp, Glycine max
agcttagtaaagctaagcactaacacatttctcttgaaaaatgattgaaaatcatgtgaacatgttataacacattgttaactaggaaagggtggttctttgggcatctcatctcaatctcataattacatttgccatgcatagcatagcgtgccctaatcattcatctctatgatatgttgtcgaagtattgacaatcaaaatttcaattcttggaattatggggtcgaaccaagcacatgcttttaagaaaaggttttcatcaagtcaaaatcaagtatggaagtaagtatgttgcaaaagttggggcagaagatggatcgagtttacatagcttctttggctactaccaacacatgattgagctaaataatttacaaaaattaaggacttttgatgtccatgttttat

SEQ ID NO: 301180 - DNA, 467 bp, Glycine max
  unsure (1)..(467): unsure at all n locations
ngaagaggatgctntaatggaggacaagacagagagaaggggggagcacgacattgaacgaataaaagagggagagaagtggaactttgaagtgtatcttataagactttcattcatcaaagttacaacaagtgttacacatgcttctatttatagactacgtagctctcttgaaaagctttcttaagaaaacttacttacgaagcttctttgagaaaacttccttgagaagctagagcttaactacacacacgcatctaaaaactaagctcacctccttgagaagcttccttgagaagcagagcttaactacataacccctctaataactaagctcacctacttaagaagagaagctagagcttagctacacacccctataatagctaagctcacccccatgacaaaatacatganaatacaaaacaaattctactacaaagactactcacaatgccctgaaatac

SEQ ID NO: 301181 - DNA, 407 bp, Glycine max
  unsure (1)..(407): unsure at all n locations
agcttctaagccatcatgacccctcatataagcaagatcagcagtagtgcattcatcaggattttgtggaccaaatttggcttcgccccagcagacaatagagttgcaaccactttctccctgaagatacaaatattaaatcaaatcataagaaaattttaattcaaagttcaaacagtctacttttcccaaaatcatgctaaatccacattgattatgttaatgtgcacctttatgtagggaaaagagaaacagaaaagaacatgaatggtgaaaccatgtcaaaaaatgattgttaggtcaatgtagttatagaagggctaatggtttaaacaagtgggatgtttgtgtattataccttccacaatatgttgcccaatgaagagctgtncatccacacctatcac

SEQ ID NO: 301182 - DNA, 376 bp, Glycine max
  unsure (1)..(376): unsure at all n locations
actganagtgngtntgagaagaggcannattgattatcctgctntgatgaattggaagcctgaggcaaatggagagaatgagaaggagggaggaacccatgctgtgactgtcgttcctagatggccaaatttcccaccagctcaacaatatcaatactcatccaatattagcccttctcattacccgcaaccctatcaaccaagaacactcaatcatccacaaaggcaacccctaaatcatccaatacaaaacaccacccttaacataaaccaaaacaccaaccaaggaagcagttttcaccacagaacatgtagaattcccctcaattttggtgtcgtatgctaacttactcccatatctacttaataatgcaat

SEQ ID NO: 301183 - DNA, 389 bp, Glycine max
  unsure (1)..(389): unsure at all n locations
agcttctcaaggaagttttctcaagaaagcttctcaaggaagctacctagtctataaatagaagcatgtgtaacacttgttgtaactttgatgaatgaaagtcttatgagacacacttcaaagttccacttctctccttcttttctacttcaatttcgtgctccccccttctttctttcttttcctctattaaagcatcttcttcaagcttattatccaaggcaattcttggcggtgaagctccttcttccttggcttattccctagtggatggngcctaccctctcctcttctcctttgccttccgctgcatctncatggtttaaaatcaccattgaaggacctcattgaagctcaaagatccagcctccataaaagctccacaatca

SEQ ID NO: 301184 - DNA, 425 bp, Glycine max
  unsure (1)..(425): unsure at all n locations
taacaacacttaaggttcaatgcaccttcgaaactatgtgttcaactaagcaatgcattaaagacatgttaatttaattgaataataaatgcgagtctttattaggaggtgtgattaattcatttaatataataaatgggcggattattcacggagtagttgaagatttgatttattctagactattactttttgttgaacaactgacctcaataacttaagagggggtgaattaattaaattttaaaattttcccgctaacaaattntaacccccttttaaatgatacatctgtccactcagaatgcagaagaagaagaagaaacaatcaatttaataatgttcttttaaatgcgcaagacaaagtaaactgcaataaaataactgagataagggaagagagaatcgcacaatcattttatact

SEQ ID NO: 301185 - DNA, 287 bp, Glycine max
agcttttcgattcattctatgtacccgtagtggtccacattgtgtttcgtgcatatttattctcgttttgtttactttttataccctccttttgacgtggcttagccattttaactaagtcatttcttgcttaacctaaaaataaaccccttcccaccgaatggttgaattggattatccattaacctcgggtaaaatcaactccgaccgcgttcggccatgccgtacccacgttggaaaccaaaggaggtaaaaaataatataatattcaaaaatatctctttatt

SEQ ID NO: 301186 - DNA, 410 bp, Glycine max
  unsure (1)..(410): unsure at all n locations
tganagtgtgtaaccaaccattntctcattgtagaacaccggtaacgtgtatactatcattgtgatcatctttttctctgtcattgaaggtgccacttgagctgtcaagtccctccacctctgggcgtattccttgaatgactcatgctcttttttacacatgttttgtagttgcgttctatccggagccgtatcataattgtactgatattgcctaacgaaggcaaccattaagtccttccaagaatagactcgggaaggctccaagttagtgtcataccctaattttgctcgcgattattacttgcgacatgcaacctttgattgcgcgtttcaagatacttgcgcacctttgttgcacaatatgtaagtcttgagacgcaccggaagtcacaaggagcagggttatg

SEQ ID NO: 301187 - DNA, 404 bp, Glycine max
agctttataatgagtaattgtgccaatgcaccctgaatatacatcttaccatccctctcacacctctaattatttccaccgcacaaaatctgcactataaagtccatcacctcctcttgtattcaccaaatagactattagaccacaggtccaagactgaccctaatcacactttataattatttttttttcgtgttggcatatttcctttttctaaactttttgctctctttttgtttgtggcagatccatgagccagaatacaaaatcacattcatgggccttcgttgcagatctacttggttggaattcattgatcgtgtcttatattacttttaccctctgttttatgctttgtcttaccctttgcggaaccatggccaataaacatcttcaacgaccat

SEQ ID NO: 301188 - DNA, 432 bp, Glycine max
  unsure (1)..(432): unsure at all n locations
ntagaaacctacacggcgatccaacgggactagcacaaagaaatataaatcgttcgatttgatgttatcaacaactcagaataattcttttttggccatcctcgtcttttcgaactagccaatggaatgtcattataggtacatgacccactttctattcgatgtatgttctttcaatttgaaattgggttgagatctagagaaaaccaacaactaaactcacccatgtaatgtactccatttatttaatgtgcttaaattatcagttcttaatttgagatatagtctctattcaatgattnttaaaagtatattgtatttttcaattaaataaaaagctataaatttatttctgaatcctaatcaatatctaattctcgtgttgctctttaataacttttctttttcgttgagccttacttaacacaaatt

SEQ ID NO: 301189 - DNA, 358 bp, Glycine max
  unsure (1)..(358): unsure at all n locations
agcttctttaacactactgcaaaaaagacatttaaagacggatattaaagacttttaatgacagttaacaaccgtctttatatctaatgtcattgaaagttaagacttttcacgacagttctcacaaaaccatcgtagaaaaccaactctcctaagacgattcttttgtaagaaccatctaagatagtatatattctaaaaagaaccgtcttacganaaaatcatcttagaatgtataccttctaagacgtttcttaaaaagaaccgccttataatgttcgatcctgtagagaatgaattctgtggctacacttactagtgacaccagttcgtaattatgtggttacaccaacatttc

SEQ ID NO: 301190 - DNA, 284 bp, Glycine max
tgcccagagaatgaatccacggaggaaatgcttaccacctctatagactggatagcgagttctaatgactcttctgttgactgcacatattgcatagaggatgggctgctcacctagacgtcttcctcggctgatacgatgaccagatgcacttccactacgaatatgaactcttggtggagcgtagagggaacaaatctcactgagtggatccacgggcgccccaacagacatctgtaagggggggctaatatcgattatatggaaagtaacttgacaggtgt

SEQ ID NO: 301191 - DNA, 405 bp, Glycine max
  unsure (1)..(405): unsure at all n locations
agcttggcactgattntgtaggtataacatcattattcatgttcttaatttgcatgttaaatatggagaaaaatgtgtttttagtctttatatttttggtaaaatataattaagggttctgtacctttatattgataaatttaattttcccaactctaaacggcgtgtatttaatctcttttatttctaagatttcattatattttttaaagctattatatccataaattgttaatcccatcgatactaatttcgatctacttatacaaaatctcgatttaagctgcgaaagaaaaaaataacatgtaatcgagagacaagattctctagaagcgattagtcacttatacaaagatcaatatcagcaaaattagtgaatatttcatataaatactatgctaaaat

SEQ ID NO: 301192 - DNA, 462 bp, Glycine max
  unsure (1)..(462): unsure at all n locations
tgatgttctcactatattatattaagtttctacccacaggctgtcctaactcctaatttacagaaacataatataataagagttcttatttaataaatattttaattaattatatactaatacatcctaaataagtaacagggactgctagctgcaataacgtgtgtcgatgaagaatggatattgttggatgcctgctacattagaatcgcctatggcgttgaacgcttatttaatatgaattttataataagcgtgggaaaaatattaatttataataatataaagcttttnttcgcagattacatgtaccattacaataatttaatacacatgttgtaattatagagaaatacatattcgtattcatacataggggtgagaataggccaggccaggctttgaaaggcctgagcttagcctacgatgaatctttgaggcatgagcctgacctatagacta

SEQ ID NO: 301193 - DNA, 345 bp, Glycine max
  unsure (1)..(345): unsure at all n locations
agcttgcttttggctgacccattcactctataccaagtgaacttccttcccatccatggtgcatcctctacctccaaatcttcaatccactcgttaaactcctttatgctattatctgcctctcctctttgacatctgccgatccttctggaaggtttctgacanttgtgaaatcccccagaatgcaccacaatcctccattatgagaactttntagttgctttatgttctcccatagacttctcttgctctgaacatcacaaggtgaataaatgtttacaatatgcacctggtgagccctcttaagccattgacctaccaataagataaagcactgcctatgac

SEQ ID NO: 301194 - DNA, 430 bp, Glycine max
  unsure (1)..(430): unsure at all n locations
tgcattnggaatagcgaaagccccactccatcattaggattagtacctgacatctcanacaaacaaatcaaacgtaacaagacaattatagttgttgtttgaatacctcacccactcaagtgtatcacacaattatggcttttctctaatgaaaacactcttgccttttaccactctaattccccttgagttcttaagcaattcaagagattatggccacagcaaagaacaattcaccaatatgtgtaaggtaaggctagagagacaaggaaaaggttaaccaagaaaaaggctaacctgcctctaggcacaatgaaggaaataaaatttagaatttaagaattcaagtaacaatccttcatacaaccaatatattaccttanagagattnttttttttaaaacanaagttcttcaagcatgaaccattc

SEQ ID NO: 301195 - DNA, 411 bp, Glycine max
agcttgtcaagtcctccagcctggacaagtgttgttcgggctgcttctgtcaagttgtccaaggtggacatgcttttggttttgcatgtgaggtctaacatgtcaggtgagggaagcctgtatatttggcaactctgtccttttctaactctggagaatgcattgaagacaaactttatgttttgtctgttaatgcagttgcgtgtagtgcacacgtagtactcttgcacacgtgtcactcgtggagtgggcacgtactaaatacgtgttgcgtgggatatgaagttgttttgtggtctcctcttgccagtgaccaccgtcacttcaaatttctatcttctttctctcgaagtataagttttccctcacctacacagcaagtgtcgctgcagacgccaggtgaagctagca

SEQ ID NO: 301196 - DNA, 469 bp, Glycine max
  unsure (1)..(469): unsure at all n locations
tctagccaaatggacttaccttgaattaattcctttgatagctccttttgagccttgtttccctttccttgttttgaagctcactacaagccttaagtgaaaaaccatgatattaccatatccttaaggaattttggagctttggaattgttttgggaataagtgtggggggttttttgtttcattggacaacttgttttgttggctatgcttcatgatgtattttgggccatacttgatgtacattgtatattggttaaatgttggacatgctgaatgaaatgttgtttctcanagctccacagtaaaaaataaaaaaaaatcgaaaaaaaaaaatcgaataaaaaaagaacaagaacagcaataaagttgagtgaataagatcttaaatggcacaagaatgatgaaactctcggctctactcttcatggttacattttatctttacttctctttatttttttcttaa

SEQ ID NO: 301197 - DNA, 399 bp, Glycine max
  unsure (1)..(399): unsure at all n locations
agcttcttggactaagtaaactccgactctagattgagactgattagcccaagcttttggggtaatatgtactactcaatcttgacaaacctcctcaagaaggcacttgatcgattaatgaccgggacttaccaaatgtcacttgctcaagggacccagaatcgaatcccacccaaccttgcgataggtgaaagagggaaatgtgaccatcgagtaaacacttgaaagaaaaagtgttattatttcattaatcaaaataaggatacattattccctgggtcggatggatgtgaccctcgagtatcctaaaaacatcttaacaagaaaagacctaatcattatgctttgtatgacaacattntaatgtgtcttaacaaagtaacatagagtgttaaagct

SEQ ID NO: 301198 - DNA, 438 bp, Glycine max
  unsure (1)..(438): unsure at all n locations
tcttatccaaggcactctcttggtggtgaagcttctcctttcatggcttattctctagtggatggagcctcctctcacctcttctcctttatcttctgctgtaactccatgactgaaaatcaccattgaaggactttattgaagctcanagatccagcctccatagaagcttctcaagcaaggttccatcaagtggtattagagcacaagatcttcaagtaggtgctcttttaacctcaattaattttcagctttaccttctcttccattgttgtttcttcattnttctccatcgctctcctcacatgtctgtgctgaatgtttttaacatgattntttagaatctccaccgattaaacatgctatagaagctagaattgattttctatggttcacattcctttgtctagttcttgaaccatgaattgtgttgagttt

SEQ ID NO: 301199 - DNA, 363 bp, Glycine max
agcttgatttgatgaagtgtggaagggtgacacttcctacttttattcgttggtcacagagcggtacctgcagatatgtggggggggtcaagagaccttggggacgtcaggtggggtgctattgcccaaaaccaagcttgaccaacccgacccaacccgggcatagtcagtcagtgagaacctgtgatgtacctaaacaggcgagctcctggaagtcaatcgataaaagaacaatgaccacatagcaaggaggcttgtgtggtggctggccagctgtgaatcttgagtgatatatgggatagggcctcttggtatcgattaccgagggtgggtagtcgattacaaggcttataagtgaagaca

SEQ ID NO: 301200 - DNA, 391 bp, Glycine max
  unsure (1)..(391): unsure at all n locations
ngagcatatggatggcctttggctaaatcagcagcatgagccgtaatcttgtaagctataacgccagccttcacgtgatcccggtttggcaacccaagatgttcttttggagtcacataacacagaagagctgtacctagtgccccaatattcgcagcaccaattgcagacgcgatgtgatcatagccaggggcaatatcagtattctaatgaccaagagtgtaaaaaggcgcttcactacaccattctaactgtttctgcatgttttcacgaatcttgtgcattgggacatgcccccgccttcatctcatacctgtaaagtaacttaaagtaaaaaatataccccatcatcttcaagatatattgatggtaatatcgcctcacatgatga

SEQ ID NO: 301201 - DNA, 248 bp, Glycine max
agcttgcttgatttacatctcactctatctcaagcgaattcttctttatatcatgaaaatcctcatgatttacattctccccctttttgatgatgacaaccacctgtatgataggagcaacaacaaagacaatatctatatgcatccccccgactccgcttgggttacaatgatcgcttatatgaaacaattgacgattccatatttttcatatataaaaagtcgtctcataaaaaatagataatctt

SEQ ID NO: 301202 - DNA, 433 bp, Glycine max
  unsure (1)..(433): unsure at all n locations
tgtacgccttggatcttcttcatcaaaggagtcctttgcttcttgaatatcaatggcagcggaatggagaagaagaggagttgagaggagacgccacttcaacgagaagatgagtcaagaagaagctcaccaccatggcctctatatatagcctaagtgtcacacaaaattggagggaaatttgaatttctattcaaatttcacttgaatttgaaattgaatttgtggagccaaaatttcactaattatgactagtgaattctagctatggttcagcccactaatnnaagatcccctcccagattctccataagtgtgcttaagtgtcatgaggcatgtaaagcatgaacgatgtgcacacagtgtgactatatgatgcggcaatggtgtgtatcatgcacatgcttcacctcccctctacaatttaattgga

SEQ ID NO: 301203 - DNA, 96 bp, Glycine max
agctttgtttcatattttctggaggagttcggcatgttttcttgagaagcctctacatgcacgagagtctggccttggcttgaagcttttgcatgt

SEQ ID NO: 301204 - DNA, 288 bp, Glycine max
tgcgactctaggccatttctatataactagcgcacttaaaatgttgtgacttctgaaacaatcttcacaaacaagtcacttgaagaattgtgacttctggaaatgtactttttgaaatcacccactggtaatcgattagcatcaaggagtcatcgattacacatcaacatatgtgactcttcgttttaaattgcgaaaatcaaaacgttcacaagctctggtaatagattacaaatattgtgtaatccatgacacagatataaagtaattggaaaatgtttatacaga

SEQ ID NO: 301205 - DNA, 398 bp, Glycine max
agctttatatttagactttaaacactttgttttgtttggtaaacaacaatttggaagaaagaaagatacataaaatgtatttttttttaaatgtcttctgttgtacaatggtttggaaaagtataagagaaagcaaaaataaaacacctcggaccctaatcccttaatttctctcgatagactgagaccaagaaagaagggggaaaacaaaattatctattagaaaatgatcatatttattaaatcttaacgacataattatctatatttaagaagaaattattttggtactcttcatgttaaatgttttttgtgaataatacaggttttgatgatactaagattctgaatgtgtaatcaactatcattgatgtgtaatcgattaccagtaacggaac

SEQ ID NO: 301206 - DNA, 357 bp, Glycine max
  unsure (1)..(357): unsure at all n locations
tccgaatccagagatgacagttactctgaacaccctgcattnttgctgngacacccaacaacacaatgaaagggctaaaatacctttcaccttttctagggatcggcggtccgtatccgtatgactcatacaaattggcgatctgtataaatttttcttaactcatacaaattgttgattcgtagtcatacggattgttaatccatatatccatacagatcatcaatctgtataatcatacacattgtcaatccgcatgttttaactgtntaacaattatttttctaaanatctccattcattgactattacaaaatctgataattaaacaaatttgatatttaattgaatgacgta

SEQ ID NO: 301207 - DNA, 323 bp, Glycine max
agctttatggtgaatcaaaggtgattcaaaggtgttttgatgataacaatgatgataacaaaaggtgatgacaaatgtgatgacaaaaagctcaaagatcaatcatagaacaactaaagtgaaccaagaacaattcaagagttccgatcagaatcaagaagagttcaagtctcaagaagaaagtctagagacaagaatcaagattcaaggttcaaagatctcaagaatcaagatcaagattcaagactcacgattcaagaatgaatagaagactcaatcctgatcaatattagaaagtttgtcccaactttgaatatcacatg

SEQ ID NO: 301208 - DNA, 257 bp, Glycine max
tcaccactatctcttgatgtcacaaacgttgaccatgtcggacttggtagcgtcatcgaccgagagaatgacgttggtagcacggggagcgaggattgaacagtactaactgatgcactactacaatatttagatataacatcggacggttaacatgagttattcacaaaagcgatgttaacaaaagcgcggaggcattcttgctagataaaatacttacttaacatcagttacgcgcaagaacctttatgtcttct

SEQ ID NO: 301209 - DNA, 319 bp, Glycine max
  unsure (1)..(319): unsure at all n locations
agcttattccttagctcatgaagttattaatgcaccacccatagctccatatatatccattatgtatgccatgggaaagggaaagttataatgatgaggatgggctactcattagcgagcgtacgggaccttcatactnttcgctcgccccgatccttctatctctcttcacctacgacttatttagctatgatctccctaatcctccttacaagggcgatacaataatatgacgccgatacaataatatgactccctgataaaataaaaggagtcttcaaccctctaatcaatagaggctagatcggactaacgagag

SEQ ID NO: 301210 - DNA, 354 bp, Glycine max
  unsure (1)..(354): unsure at all n locations
tgcacaaacatcaagtccagtagaggacagacatgaagcatctcatgatgaacctatgatttcatcaattcttgaacctgttgatacttcatataacctggtcagagacagacaaagaaggcagattaaagctcctataagattgggttatgctgatctcatagcttatgctctgagtatagaatctgatgatcaaagctcagaaccaatttcttacaaagatgcaattttcagaaccgacagtgatcagtggagatcagcaatgcaagaagagttngactntttcccaacaatgatacttgaaacttgttganaagccagtaaagcagaaagttgttgggtgtaatggatttc

SEQ ID NO: 301211 - DNA, 406 bp, Glycine max
  unsure (1)..(406): unsure at all n locations
agcttacataatgagcatctgtccctcaaacaaactctgcaacttagaatctaaagtagaagatgaagggatgtcagctgctggtgcaaaagaaaaaggaacaccagctgctgtggacctggttttccttgcccctagaaaattaactactggtcattcacattccaacatttccttttaatataggccaagttgatgaccggcctcaggctcctataagaagtaagagcatcagatccaactctccttgtcctgcacaaggctatgattaaagctgggaagcctaggcgagaagagttggaatgagccataatggttatctatccaaagatcaagccgccaatgttcatgtccatccttgtgactaagccatanaccaacctagctctgtccatattcaagtctg

SEQ ID NO: 301212 - DNA, 439 bp, Glycine max
  unsure (1)..(439): unsure at all n locations
tggtcaaccctntatgcaatggaaaacaagttgatgaatccaagcaatcacaagcaagatggtcttgactaaatgcanaagtaaacagaanaacaattaaattaaaaaaaactaaaggaaaagttgggttgcctcccagtaagtgcttctttaatgtcattagcttgacaagtcaaatgcctttaaggtggcatgaaggtcacatagaacacatcttccttgcagtttcgccttttagctagaaattccatgaactttatgtattttggaagcacattccaattcattgcaatagaggtgcggtgatcaaggaaggatgacacttaaggttntcttatgttctccctacctttcttccttgacaatcagttgacgaggaaaggtattgatttggagaatactttcttggtgattntctactgttgagtactccccccat

SEQ ID NO: 301213 - DNA, 362 bp, Glycine max
  unsure (1)..(362): unsure at all n locations
agctntaaatgagttaaaaattgaactgtgccaganagcttatctagacagagcgaaccatttggcagttttttacatgaatgggattcaggtttggcttaatcgtaagtgggacctaaggcaaattttaagaaaactattttagttcgagagaaattatatagtaggtcttttttgttaacatccgagtatttgtagattatatagtaggtctttttccagagtttgaatgtgctcatgaagttcatcaatatctgttgtcaatcattataccactctgggacgatactntagtttccaagctgattactttgttcagtagctcatcaatctgctctgccatttttgcacgctgagtgatg

SEQ ID NO: 301214 - DNA, 445 bp, Glycine max
  unsure (1)..(445): unsure at all n locations
taacgcattntacctctaagggtcttgtaattgcataatggtggtcagtctctcgatgttcccaccatggtatagcttcaatctctgaccatttactatccatgttctgtgcggagtttctgactgagggtcaagtaattccacaactccatatggcttgacttccttcatggtgaatggtccagactatttagactttaatttgcttggaaacaactttaatcttgagttgaacagcagcacttgttgtcctggcctanagtccttctttagcagcttcttgtcatgataagccttcgtttttctttgtacagctgaaagactcataagcattcaatctcatctcttccagctccaagagttgcaacttcctcttttcccctaatagagcctcatcaaaattcaggaatttcanagcccagtatgccttatgttccatttctac

SEQ ID NO: 301215 - DNA, 407 bp, Glycine max
  unsure (1)..(407): unsure at all n locations
agctnttagtgtgtttttttgaaatgtatgcatgagatagatatttattcatttgatgcacacaaacaccaacactatttgtacacacgatgagttgaaaaggggccctatacccgggtccatgggaacataaggagtggaggtgaactgcggtcatgctgggtcactgacttgcttgataacagtgaaccctcatctagagtttttctctttgatagcatgtggttgctggtagtccctactgccgcaatatgttttttcgaagggcatgatacctctagaaaccatcaagagagatatgaccaccttgggaattatcactaanagccttttagttccttccgtttaggtcactaanataggggcacgaagtgaccacgctgcgtgccttttaaacactgccatgc

SEQ ID NO: 301216 - DNA, 441 bp, Glycine max
  unsure (1)..(441): unsure at all n locations
ataagtgcgggtctgggagacgaaggtcaagtgttcgcgatatgtgaagatgatgttccaagtactttggatttggtccgaccatgccctcctgatttccagctgggaaattggcgagtggaggaacgccccggcatttacgcaacaagcataatgtaaacctttacggttttaaaagctctatagttgggcctaggctttagagttttcattctgttaaagctttgtgtcttttgcttttgaattcataatacaaggatctttcttcatctgttcctggtctctacccattctcttcatttgcatgtttattctttntctaaaacggcagattcgatgacgagtcccccgaaggtactaatacctgngacccgtctatcaacttcgagcaagaaatgaatcanacggaagatgaaggagatgacgatgtgggacttcctt

SEQ ID NO: 301217 - DNA, 369 bp, Glycine max
agcttaaacattcactttcgagcctcacttcaacattcaatttcgagcgtctcgatatatgacgggactcaatcagacatccgagtaaaaagttattgtcgcttgaaatggctcagagcttcaacattcaatttcgagcgtcccgatcgctcacggcactcaatcagacatccgagttaaaagttattgtcatttgaattggctcagagcttcaacattcaatttcgagggtctcgatatattacgggactcaatcagacatccgagaaaaacgttattgccgtttgaattggctcagaggttcaacattcaatctcgagcgtctcgatatattacgggactcaatcagacatccgagaaataaattat

SEQ ID NO: 301218 - DNA, 410 bp, Glycine max
  unsure (1)..(410): unsure at all n locations
tccatcaggatgtcttattgagtcccgtaatatatcgagacgctcgatattgaatgttgaacctctgagcattttcaaacgacaataacgttttactcggatgtctgattgagtcccgtaatatagcgagacgctcaaaattgaatgttgaacctctaagccaattaaaacgacaataactttttaatcggatgtctgattgagtcccgtaatatatccagaccctcnaaattgaatgttgaagctctaagccaattcaaacgacaataactttttactcggatgtctgattgagtcgcgcactataacgagacctcgaaatgaatgttaacctctgaccaattaaacgacataactatttactcggatgctgattgagtcccgaatatatcaaccctcgaattaatgtg

SEQ ID NO: 301219 - DNA, 409 bp, Glycine max
  unsure (1)..(409): unsure at all n locations
agctntagtgggatggtaataattactttcaattcacatatttctaaggctgaaagcaaaacatttgagctttcatgcatgtgtcaatgataggcttgtcgtcatacttttgtaattgtagctttaagttgtatttttgtgtgatcatctttgtaaatagcaattcttattagcttgtaatcttatttttgttggttctaatacctttgagggggagatgaaaggaatccaaagttggttagaggtgcattaagagataatagttatacctattcctagttatgattctttttaattcaaaactcagcctttctggattatacaatatctttttctatcttgctttctgcttgngttaataacaaattttcatctcaacaacttaacttaagttttttgtctaatatta

SEQ ID NO: 301220 - DNA, 388 bp, Glycine max
  unsure (1)..(388): unsure at all n locations
tattgtntatggattgccaaattccacatcatttgacattattcttaaacaaactagtttattagaacaaacaataaagaaaaaatgtatgggctggttttatctatttatagaagattttgagtgaaattataagattttaaagtttatgaaatcaatagtattctggttgatgccaatagaaaccaggtaaaaatcaaatcctttttatctcaacaattataaagtccttgcttcaaatgaaggaaagcattgctctgcctataggtaattcttgttctactgtattgtaatgttctttctgtttgcatgtgaatacattcaagttttatggttttgggttcttctctttacatctcaagtttatatatctgtacgaaaataacat

SEQ ID NO: 301221 - DNA, 374 bp, Glycine max
agcttcttatccaaggcatttcttggtggtgaagctccttcttccttggcttattccctagtggatggtgtctccactctcctcttctccttttccttccgctacatctccatggtgtaaaatcaccattgaatgacctcattgcgctcacagatccatcctctatagaagctgcacaagcaagcttccatcaatagtactcgcttagcgcacagccgcgcttagtgagttcaacaaataactcaacagagaagatgaacgcgcttaatcttcaacagaagcgatgaactcgcttagcacagcaaggcacatagcgagttcatcgtgatttccagaacactaggggtttctcaccccttctcataggcccctat

SEQ ID NO: 301222 - DNA, 403 bp, Glycine max
tgaaccataacccggtgagagtgtgaacttaattgttgagagaacgactagcatacagctatgatttttgtatcaatctctgaattttacaatgaaatgcataaatgtggatatgatgaaggccattattgttgtatatacaagccacttgaccaaaagcttacctatttattaatgatgatatcatttgcgcccatctttgagctgaatcgtaattgtcaagctgaaccctgagctctgaaattattatctccatttaccttgcttacgttttaggagagcacattgcgttacaccatcttgcccctgattgagggagtattttggatggataaatttaaagaagtctaaactttgaagcttaattctcaaatgatcgaagttgacaaaatacatacacatg

SEQ ID NO: 301223 - DNA, 397 bp, Glycine max
  unsure (1)..(397): unsure at all n locations
agcttgcacacaagattctccttgcctggcacctcaaaaccttcaggttgggtcatattgatgtcttcctctaaatccccatgcaagaatgcagttttaacatctaactactccaagtgaagattctctgcagctacaatactcacataactctgatggtagtcatctttacaactggagagaagatttctgtgaaatcaattccttgtttctgctgaaaccttttcaccacaagtctctccttgtatcttcttctatcgtcggattnttcctttagcctatagactcacctattctgtaacgctttctttccttctangaaattagttaaagaccacgtcttattcttttgaaggggtgtcatctcatctttcatcgctagctcccactcaatagt

SEQ ID NO: 301224 - DNA, 452 bp, Glycine max
  unsure (1)..(452): unsure at all n locations
tctcccncaattntctataaatagggggagaagtgaagtgaataagggttcggtcccttaggcacttctctctctttcgaatttgcttggaaaaattgtttccgtgaagaaaatccaagccgaggcgcttctgaaacatttctgtaacgtttctatgaggaatttcgcgaaggtttcgaccgttcttcgatgttcttcattcgttcttcattgttcttcagtcttcaacgggtaactaccttgaaccaagcttttcgattctttctatgtacccgtagtggtccacatttggtctctcgctttttattctgtttcatttactttttatacccncttttgacgtgcttaagccattntatttaagtcatttctcgcttaacctaacaataaaataaatttccaccgatcgtttgaattgtattatccattaacttcggctaanatgaattccg

SEQ ID NO: 301225 - DNA, 230 bp, Glycine max
atgttagcgatatgtaaagatgatggtactcgtacttacgatctggtccgaccatgccgtcctgatatccagctgagaaattggcgagtggatgaacagcgcggcattctccaacgagcataatgtaaacctttacggatataaaagctctatatgtgggcctatgctttatagtcatcattttgctaaggcttcgagacttttgtgtacgaattcataataccaagatc

SEQ ID NO: 301226 - DNA, 306 bp, Glycine max
attacgtgaactatagaacctcaagcttgagtattgctgcattctactaatatatggaattgttcactgctttgcctgagaataacaattgcttgaccacaacagcgctggatgcggcaagggacaatggtctttcaaataaacctgctgtacatgaacaaacattatatcatgcgctgaccgtgcctaacgaaccagcgaagtcattgcataattgctatactaactatattcaatgtacctgaacaaaatgatttccaaacacgtgaccgacacatatgatgaggtggccagaagaatgaggtg

SEQ ID NO: 301227 - DNA, 399 bp, Glycine max
  unsure (1)..(399): unsure at all n locations
acttgagtnnagccttatttntacattcaattggcgagcgcctccatctatgacgtgactccatcagacatgctagtcaatagcttctgactgatcgtaatggctgataccttcagcactaaagctcaattgtcgtggatccctgcccccctccgccagactttctggtagtgagtgttcgagactcgtagtgcctcagagatctagcattctacttcaagtggctaggattattggggcacttgtgccgaaatgaccgatgataagtgcttccgnggaattccttcctacgcttaacgtcggcttcacggcgtcgccggattttgcgggattctttgaacctgccactttataaccactctccctcgctttgctccatggtcaccctgactttccccg

SEQ ID NO: 301228 - DNA, 375 bp, Glycine max
  unsure (1)..(375): unsure at all n locations
tactgattgagaagattgaaaccacaataatgacatgtccatgctacgcatgccatcaaaaggaggcttatggtggtaagagaacaataatgatttatcggccattcatgctctccatcgtgaccataacagacgtatgtatctatgtagcattgctctttacagactcacctacagtttactatgtctttcaacccataaattgcgaatcattacagcatggcgcaatgtcattttgtatattaattagtttctactagaagctaccaccttttgttaatatattattntaaacctcatacagtcttaatttctcattatggactaaagtacatgcatacagaattaacatagcatcgacttaagcatttcatt

SEQ ID NO: 301229 - DNA, 396 bp, Glycine max
agcttcaagtgaactaaggagcagataagaagttctcacccggtaggtcgaaagctagaaagaggagcctaggcaaaagttagggaaataaaaaaggaaaaaaaaaataggggcgtgttatcaaaggttttgtccaaaatctaaattcgaaagtctctagtcaatatttgaaatgacacatggtcatgcttcattatcccaaacactaatttatcccttgttaccccttctgagccaaagcatatttgttttcttttaaaacaacaacaacaacaacaaaaacccgtagtagcaaccaccgctgagccggcgggaagagcaaggcaaacatcatatgcatgaggtaagctctaggttgggcaacaatgatgttaatgaaaaaaagcagaaagcaaa

SEQ ID NO: 301230 - DNA, 450 bp, Glycine max
  unsure (1)..(450): unsure at all n locations
ggattacatgttgcatttgtcttagtttcacttatttactttcaatctcattaaaagacaacttgtgaggtaaatgatcggttgaaattttattttacaatgataaaatgagattacggcacaaacgatcggttgaaatttgctttacatgaagaaatgagatcactgatggtagaagaatgagatgaagatgtgcaaagcaacaaggaggacccctaatggtgcatatagagaattcaaaaccttataataaatactaaccgattgacaaacgaacgaagaacgatgtangactgatcacggctgtgatcggaagtgcctcggcctcattntttttcttctttctccttctccttaatttcactaaatgctgtcaatatatgaaggttgtatccctttcttcagccccatcatgactatttatagganatgaggngacttgtttgatct

SEQ ID NO: 301231 - DNA, 320 bp, Glycine max
agcttgacttgagatataatctatctcagctatattcccatttgtgcaagacttgcactgcacaccgagtcgcagtgtaatttatctttgtgtgaggtttatgttgagtacatgtatcctgagggagattagaacaataattccacgcgctcgcgcgtcatctagacatttaagataagatgtataagtgtcggcaaatagcactttttaccatttttgcatatgtccactatatccattaatggctaacaattcaaaagcaaaactacgcacttatgggaagctgatgcatgaacgctatgacctattcaatggtcatt

SEQ ID NO: 301232 - DNA, 347 bp, Glycine max
ttgcataccccaaggatccatcagtatattacttgtgaaatatagccacgagggcgggctcataggccactttgggatacataagacccttgtcatactcagagacaagttttattggccccgtgtgaagaatgatatccataagctttgcactatgtgcgtggcttgtctacaagccaagtctacggtgatgcctcatgggctatacacacccttacccatcccatctgcaccttgagtaaacattagcatggacttctgccttgggctatctagaacccaaagagcccgcactctctctttggcgggtggataggtttatcaagatggctcactttataccatgc

SEQ ID NO: 301233 - DNA, 399 bp, Glycine max
agcagatcccaacggtcataaggtagttttatgtgctagagacttccagtaaaattttcgagtcgatccaacggttaacaaattggaacgaagagaatattactggggtatttgagtgtgaaaagctgtgatgttgggcagactttctacctctgcccggttttcttggctgtgttagttcatgatgcttggatgttgaattacttggatgttgtggaagcttgggaggattgatggggacccggcgttgagaggaacgaggataagggctacgtgggagtacgtgagctcagttgaggtgggcaacaggggatggtgggtttatgcgtgatttgtggatgtggagaaattgtttgcaccatcgcccgaccgccatctagtagcacatgtgatgggtac

SEQ ID NO: 301234 - DNA, 415 bp, Glycine max
  unsure (1)..(415): unsure at all n locations
ntggatgcaaatcagtttggaaaactgaggggcaagctgggcatttgtctgctagaggaattatagcagctactgcaatctgaacgtgcccaaacgaatcacttaacattaatagcacgttcaccacaaagaaaattcgaccgttgcctcacacgcccctctacattcttcattcaaatttatatctgcttggcattcgtgtttttaccagcatttcccaatagccttctgagatttacgaaatcattccaaacgctctgcttttccatggctacctcaccaaaagaacttccgctcctggtcacccgctgtaccatcatctccgcaccaggaacaaccagaattcaacatccaacccatacaaataattcctgggcaagcttctgtccctgagaaactggttccagaagacaac

SEQ ID NO: 301235 - DNA, 309 bp, Glycine max
  unsure (1)..(309): unsure at all n locations
agctttattacattctctcttggtccttaccatttcttgaatacttcccttccaccaccaagattccttatctcagtccaaaacttcttgattcactgaagactactttaccaaccattctatccttcttagaaacctnatctcaaacgcgccacccgctaccttgtgatgctcaattaccttcctccaataatttcttctttaaagacaagtgtttctcacccttgagctgccatcacttgattctcgaatctgtaacttgccgaatattttgtgtactactcttaacaccaatatcaaggatcaaga

SEQ ID NO: 301236 - DNA, 458 bp, Glycine max
  unsure (1)..(458): unsure at all n locations
ctcaagcttgaagggctntncanttatagagaattgagactcctatctctgtatgtataatcgttaccggatgagaagatgaaaggtctaccaccaacgggaaggcataggtccacttctatttcacaagtggaaaaggtcacattgcttcattatgagtgacattttaaatttaatctaagctgttaatataaaataaaatcaatggttcagattacaaataactctttatacttactcnctacagtaagtagatcccctcccatatatatatgaagtaaaaatagcaacttttgcaaaaaaataatactgcccacctcattattactatattatctacatctatgactatatctatatacattacaattgaggattcatctcacaacccatcttgtcacctatcttcctatgcgcttgaatttttctgcattcaaaatattaaaactagtccatta

SEQ ID NO: 301237 - DNA, 403 bp, Glycine max
  unsure (1)..(403): unsure at all n locations
agcttcttcatgttgctcctcctatctcttacaccttattcttctatcttatctttgacacttcttttttgtacattataataactgaaagtccaatgaccttgattatatatactttttttaatgaaatagtgaaataggttgagcgcctatccttttatttctgagtaaacttctctacactaagaagagtaagttgctaaagtatccattttccttagagagccaaaagtaagtcttttctctattgggcttccaaatatgttgagacatttctaaggtgaacaactgaacatacaagacacccaatgttttcttgtttctggtctttntaattctccttgtgttgtgtgattgcttcccaatgattagtttagtttgctataccgatatttttgataca

SEQ ID NO: 301238 - DNA, 476 bp, Glycine max
tactcaagcttgttgaactcatatgcatgatgatgccatgactcacaaatgtgaggctggaatatgataacggacaaatgcaggaacgatatgttcattatgatgttatgaagagatgcttatgcgatgcatgatatgaatgcattttacggacacgagagcccggaaaattatctcttcttacttgcgcatttgggggcgcagtgccccatgtgtatagttaagaaggtgatatggaccttccggcttaccatgacaaaggacgagaccaacatacaatgcatgctagagataaaatgcgggagtgaccgactcgcactgattttggagaaaaacgtgggataaactcatcttattcaaaaagttataactagtcaagatctgagcgataatacaaacttcctagtgcgttctaatcatatggtccattaagtctatcatatgctgacaatagctgagaagtccgcggatcttct

SEQ ID NO: 301239 - DNA, 300 bp, Glycine max
agctttgttatctactgaaggctctcgaagagtcagatgagggagatagcgttacggttacagaggagtggacaaagggtcttgtgggttatgaggaacccatatgagagaagcgaattgattttggaggaattgttgccataagggcccctgcaccgacctacagagaggggaatggtgatgaagaattgcgcgccacaagttaagattctgagtcatgactcggtgggtgggttcgtgactcactgcgggtggaactcggtgttggaagcggtctcttggggtgtgcctatggcgtcg

SEQ ID NO: 301240 - DNA, 374 bp, Glycine max
  unsure (1)..(374): unsure at all n locations
tgctcgtgcggcttctatggaggctggattcttgagcttcattggggtcctttaatggtgattttccatcatggagatgcagcggaagacaaatgaacagaggcgagaggaggcgttatccattaaggaataagccatggaagaaagagcttcaccctcaagatgagccttggataagaagcttggagatgatgcttcaatggaggaaaagaatgatagagagaaatacagacgagggagcatgaaattgaacgatcaacaccagagagatgttgaactttgagttgtgtntnanaacttcctccctcctctcagtccacaagtgtacacatgcttgtagtatagactacgtagcttccttgagaagctctctt

SEQ ID NO: 301241 - DNA, 265 bp, Glycine max
ggcgagctggttgcttcctgatgaagctttctgatgggcccagtgctgaaggacaccccccagtttgattagttcacccccatttttcgtattctgctcatttccttttgaaacgttgcgaaactttacggattacacggcgaaaagtcccagcatctcaacttcgctgacaagaattaaatggttgtaaacaacgtcccagatgatattatgtgtgaacataatattaatgatgaatcatcatctcacataacaccattgtttc

SEQ ID NO: 301242 - DNA, 457 bp, Glycine max
tgagttgcatttgatatattttgtgttgatacaacaagatctataaaatagaaagaaaaaaaaaaggtgaaaacagggttgacacatttcccctcagcttgcaacttttgcagataacaaacaacaaatgaataaaaggaaatgaaataacattggagataaaataaaccctaaagcctcttcatataccgaagcatcatgggcagcatttgaatatgcaagagcagtgtttccacaatagacatcctagttgtgaagagagtgaggatgaaagagaagagaacaaatgagaaagtgacactacagtatagaaaaaaaaaggagaaagcaagtacaagaagagaaggagaatgaccaaggataagagagaagagaacacggattagaacgagagagatagagaagacaactatcatggaaggtgatgacaacaaaagtaacgctaacaactgttcat

SEQ ID NO: 301243 - DNA, 249 bp, Glycine max
gataaactagtcccgcgagcttaatcaactgctgctgcagctgttatttagtaaacactaatttaaccgatgcactcaaaggagttatgataaatatcatctatgcaactcttattaagtgttggagaagtaaacaatgggggaattcactctgctaagacttaaaatgattctgacccaactctgttacataaatattgaaaagaacttaattattggatttctatgaatcatttgatcgactaaatc

SEQ ID NO: 301244 - DNA, 399 bp, Glycine max
  unsure (1)..(399): unsure at all n locations
tgaagaatgtctacatgtttacatcgcgccactctctgtgagtgtactatttgtattcatccgtcatctgagaatcgtggcatcgtgaatcgtctatgcttatcactatatcgcactcagcgcatctattagtgtgtgtagtgaacaagaacatcttctacgatttattaacatttcttcagaaggcaacaactctcgtgttttacattgattacatgccttacagttaatcgatcgcacaaagatgctttaaggcttatanaacntatacctccgtatcgattcgaatgaattacaaccttatcgtaatcaattacacagttgctttttcgcccctgactgattcatccacagtctntattttaatcgattacnatgtgatataatcgactacttctc

SEQ ID NO: 301245 - DNA, 226 bp, Glycine max
agctttccaaagttttctggttttccaaaccttgaaaacttgtgctattcatccttttcattctcttctccctttgccaaaacgaattctccaaggactaaccgcctgaattctttttgcgtctctcttctccctctttcaaaagcccccccgacccccacctgaatcctttggtgtctcccttctccattgtccaagaattcaaaatgaaacagtttgagaattc

SEQ ID NO: 301246 - DNA, 290 bp, Glycine max
tcttatacaacgctcactctggtggagacactccttcttccatggcttattccttaaaggatggcgcctcctttcacctcttttcctttgtcttccgctacatctgcatggcggaaaatcaccattaactgaccccattgaagctcatcagatacacgctccatataatccccacaagcatgtttccatcagaatgtccacgtttttatagggctacactcccatgcctctctaggactacacgccctcgccttaggaggactacacatgctacctttagaggactatag

SEQ ID NO: 301247 - DNA, 90 bp, Glycine max
  unsure (1)..(90): unsure at all n locations
ggcgattcagctcggacccgggatcctctnagtcacctgcggctgcaagctgtttctagtacttacccgtgatgatcgaagaacgatgaa

SEQ ID NO: 301248 - DNA, 577 bp, Glycine max
  unsure (1)..(577): unsure at all n locations
agctcgcggcgacggggtttganttcgtatactttgctatctacgngacactatagcaatactcacagctatatgcgcggtggaatgatctgcgacggatcacactctgcttatatctatcttcgcagctacagacaatgtgcgaacgaagagtccactgatcgcatcactagagcagcaacatgcgttttagtctagcgatatctgcatacttgcatcgaagagatgtttctctcattttggcattagagatacgactcacatgatcgatcctcccgatgagcctctctcaaccattacggaggtcacctctgttcacacgaggtgagacttcctcactacactactcagctcttattgcatacttacttcgactacaggaagcgaaacataagagtttntntcccgccctctacaccgtctcactcctgataaataagggtctgtattgaggngcattcagaggccatgtgacctctgacaagacacttgaaacatcttatgatgatagcccttttttgcgagctaggctaaaggtggatttctctatcgcctcaccctgatctgtcgtgagttt

SEQ ID NO: 301249 - DNA, 392 bp, Glycine max
agcttcttttgtttgattacgacatacaatataaagctggctccttcaatattgtcgcagactatctcttgcgcattgatcacaccggacaagcccagtgccttctgctctctgatccccaccacgaggtactcaatcaactaaaacgcgccctcctcgctaacactgagtttcagacacagaagaaagctattcaagctcacccagaggatcacgctcacttcaccatggccaatgagctcattttcttaaagaatgccatctggattgactctagcaatccattcattcctgcattagtacatgagtaccacgcaaccactctcggaggtcactttggtgtcaagaagaccctccaccatgttcgctctaatttccagtggaccaccatg

SEQ ID NO: 301250 - DNA, 282 bp, Glycine max
  unsure (1)..(282): unsure at all n locations
atanaagtctaaggcgctattaaggagacaagttgatgatgctctgagaatcgatattatgcgtagcctgcgtgtacaagaacgggttgtgaatggaaagtaccttgggctgctatacgtgataagctaaaataacaaattcaccttagcatatataagagatagattgtggagaagccttcaatgtaggaagagcattcctttggccaatgctgcccgtgaggccttaataaacgcaatagctcaagcaatcgccaagtattgcatgagaatctatctctt

SEQ ID NO: 301251 - DNA, 387 bp, Glycine max
agcttcatgttgctcattgactccaaattactgcaaggaaggacatagatcagtatggtgatctgcagaagaacatagaccacaaactcttgcaacaagggaaaatgcaaatatctaattcatggcaagctgagttactaggtggccaacgcatcaagttttccttcaagctttttatttacagtggatgaagatgaatatgtggccacctcatggactcctttaaggacaatagcatcatttcttgcactgaattgttgggagttggaagccatcttctcaatcaacattctagcctcagtaggggtcatatcaccaagggctccaccactagcagcatcaatcatactcctctccatgttgctaagttactcatataaatattgc

SEQ ID NO: 301252 - DNA, 284 bp, Glycine max
tctagccaaatggacttaccttgaattatttcctttgatattcctttcgagccttggttctctttccttgttctgaagctcactacaagccttaagtgaaaaaccatgatattaccatatccttaaagaattttggagctttggaattgttttgggaataagtgcggggggtttttgcttcattggacaacttgctttgttgactatgcttcatgatgtattttgcgccatacttgatgtacattgcatattgagtaaatgttggacatgctgaatgaaatgtt

SEQ ID NO: 301253 - DNA, 402 bp, Glycine max
  unsure (1)..(402): unsure at all n locations
agcttattgtgtgttgatgattataacacatatatatgtatatgaattgttaaaataaattatgaattaatagttcaaataataaaattaaattgaaggaaattaatatattaagattcaacgataaatactttcaatgcattctagcctacttatttattaactttttttaattgataataatatagtttggtttaatatatacatgtttagtatgtaaatactaatatggtgtgacgtgcatatgattcatgaggcgggataacatgctgctttgggattataacattgtcgatnacactgagtgtatgtgataaattgagtatgtgtcgaattataagatacaagcgtattgagattttgtatgcatcgagctgtgagctatgaactatactattacac

SEQ ID NO: 301254 - DNA, 414 bp, Glycine max
  unsure (1)..(414): unsure at all n locations
tattcttnctattgttcatattctctatttgcattgaacagttattttattggtttaattgctaatttggttcttatagttccatgatttgtaccgcttagttcctatagtttgaaagtggtctttttagtccatataatttgtatttcaattgcctgttagccattgctacaacacacacacacacacacacatgattaactacaaatttgttatcacattattaactatttcttattgcacactattttgcgataaattatgtatagctataccttattntnccccgcgcgccttcattttctacatgtatntcctcacatgttttgtgctacatgttgttaacatgattctttacagcttccacccgttaaacttgctatagaagctagatttgattctctatgggtcata

SEQ ID NO: 301255 - DNA, 410 bp, Glycine max
  unsure (1)..(410): unsure at all n locations
agcttcactaagatgcatgccatccaggctgagacaccacagggtaaacaaatgacagaacatgacctctgctttgaaggttcatctatagaggataaaattggataattttatagaatacaaatacctgtattcattgaggatacacgaatgattggctgaagtctttcacaccttccctcatccaacaccatgcaaagaaaagaacctgttgaatcaaaccctctacatcaaacttggatcccttgaaaatgcacgagtttctcatcctctgagtacaccaaaccatggcacaccacanaagcctccactttttcattactaaccttagaaagtaaaggagttgcttaacagttgagcaacaagccaaagaatataatatatttttgataaattanaatacagtatat

SEQ ID NO: 301256 - DNA, 454 bp, Glycine max
  unsure (1)..(454): unsure at all n locations
tgaaggcatgtaacccaccatcttctcatagtagaacaccggtgacgtgttcattatcattgttatcatctacctttccatcattgagggcgctacttgagctgccagatccctccacctttgggcatattctttgaaagatttatgctctctcttacacatgttctatagttgcattctatctggagccatatcagaattatactgatactgcctaatgaaagaaaccattaggtccttccangagcggatccaggaaggttccagattaggataccaagtgataggccgcccagtccactctcttgaaaaaagcattaagagcttttcatccttcgcgtatgcccccattatcttgcagtacatcttcaggtgattcttggagcaagtagtccctccgtactagtcaaaactcggcaccttgaactttggaggtatgacgacgttgggcact

SEQ ID NO: 301257 - DNA, 395 bp, Glycine max
  unsure (1)..(395): unsure at all n locations
agcatctactaagtcctcttcactatctctatcgagccacaaccagcttctgcaggtgtttcagcactgttacagtgttgcatattgaatctatgcagaatatcagtagcatatttttgctgtgtgagaacaattccttcactacacccttgaatttaattccagggaaatatgacaactcacccaggtcagtcatgtcaaactcatccatcagatttttcttaaattcattcacttttgcttcattgtttcctgtcaataacagatcatcaacataaaggcatagcatcataatgtcttcacccccagacttcacatacactccatgcttagacctacatttcacanaacccaaattggtcaagctcttatctattttcatgttccaagcacgt

SEQ ID NO: 301258 - DNA, 462 bp, Glycine max
tagctgaattcagatcaaattgaagttagcttagctcaaccttggccattttagcggaccaaatcagcctcagatgcaagggttggacgctaagtgcgtgagacttgcagcttagcgcatgaacagagatgcgcttagcgcgaggcttgcgcttagtgaaaggactatttttcagaaaatgttttctaagttatttttcagttctttttccacgaaattaaaacccttatgttaaatattcaaagataggctgatatactcctatgtacagattatatagcaggttccaaatgattgcggcatgacagacaaagtaacagaaattaaaaactgggttgcctcccagcaagcgcttctttaatgtgattagcttgacgcatagcttactaccttcaaggtggcatgaaagtcacaaagaacacatcttccttgaagtttcaccttttagctagaaatttcatg

SEQ ID NO: 301259 - DNA, 277 bp, Glycine max
  unsure (1)..(277): unsure at all n locations
aagcgactgcagcatgctgctattgtttacataaactcgcattgtcggagaagcatcaacgcgtgtaccatcactaagagactatcatactaagcaaactactcgcataatatatgctagaacaaaaagnacccgcccaccactgaaaaatattgacttatttcgccaatataaattagaattataactcacaggtagcgcttaactcttgaataacaacaaatgcatatgtcaatatatacgaaaccgaaaatactattaaataatgtgctgaata

SEQ ID NO: 301260 - DNA, 77 bp, Glycine max
  unsure (1)..(77): unsure at all n locations
agcttagaagatgnttganggtttcttggttggaaggaagaaggtagaagtcagtatactacaatacgctgacaata

SEQ ID NO: 301261 - DNA, 470 bp, Glycine max
  unsure (1)..(470): unsure at all n locations
ctgtggcggagatgttgatgttaagtgtgaattgcaaccagaaattaataatgcaggggattattgtgtatttggagtgatgcaactttcaaaatggaaaagaaggtcaagggaaatggtttcatatatttggaaggtacttgggttggtgatggtggaaaagtgactataatcaatatttactctccttgtgacataacttctaaaagaattctttgggatgaagtcaaacaacttacaactgccaacaatgggggtttatggtgtattttacgagacttcaatagcattagaaggcctctgaacgagtangatgtgtcagaggattcagaatggaggcagcctgaaggaattcaataattggattgttgacttggatgttgacgatgttcctagtgtgggcagaaaattcacttagtacagaccagatgtgacaacaaaaagcacaatacatacggtccttgtcttgg

SEQ ID NO: 301262 - DNA, 353 bp, Glycine max
agcttaatctttggcgtcatttagctcggttaaagtccaaggcttcagagatatttgacattatccttaagatgaacaaagatgaagcttaagctttggcttcactccaattatataatatgcttcaaatactcaccattgactggattccccccgcgtaatccacaacaatcaaatttggatactgatcaagcacagatgcaagagcactgtccctgtctgaaggaccatgcacatgaaactccttttcaccaatctgaaaagtcttgtctgacttctcttcacacccaaacgacacaggaacaacattcagttcagcagctttcgccgcattaatcacggtctctcccatt

SEQ ID NO: 301263 - DNA, 597 bp, Glycine max
  unsure (1)..(597): unsure at all n locations
cctcccccgcgcgtacccncatatctgcacgggcagaaaataattatgctcccgccacccacacctccnnccccgcacgcggcgcgcgcgtttgatttcgtgcaatacgcacctatanaaactcaacttcgcctgaacccacatcattgactcaatatgcacattcgtcttgtgaggaaatcgaacagatactgctccctgcaagcaaagaactcttcgatcgcaccaaccaaaccaaatcatgctccttatcacttccatcatatccatctgtacctgagctatctttctcacgctactttctgtgctcattgttaccatgcgtccatccttcacacactctactacctcatcttaacaaaatggttcactggatatttgggtatccaagatgccaattgcgcctcttgggtatatgcccccgcacagcttgccacatctttgtatgtttatgtntanatatgaaaaatttaaacacaacagggcaatccngcaccccactctgtactgctccttcaaaaancatcctcctaacagtagagctctaagtcttacaacttgcacatcatactcaccaatctccacttaacgctgacg

SEQ ID NO: 301264 - DNA, 404 bp, Glycine max
  unsure (1)..(404): unsure at all n locations
agcttgacttttcacttcattttcttccttctaaattttgtggagcctacaagaggtaaaggggtctctccaacgcttgaaccatatgcttgttgttgaacttccttgaacatgttgctttgaaattttcaagcttgttgtcatccctaaatctatgtgctgagttgttttccttgagttttttatgccaaaaatgagttctttgcatgttaaaatataaagttagcctaaaatttcatccaaatcaaagtttcttaacaaaagttacaaataaaacaagtttaaggacctttagtaaaatggaaattttgtcattaaattggactgagagttacaatagtatgtactatttttattacagttttgaactcaaaaatgaattttttaaggtttgaanatgtaaa

SEQ ID NO: 301265 - DNA, 455 bp, Glycine max
gttgcatacattcattcccttagtgttattgtctttttctctctataaagaatagctatttacatttcattcatgcaactcattatattcgtcatagaaatatatttgcatgtctaagtatataacatgaacatgccatgcacattgctctcattgtttttttaatacaagaataaactgtgcatggaaaagttttcctaggatttacgcacatcaatttagaaagattaatattattaattataatacacaacaaaaaaactccgcttatgtaaccttgcttatctcccgcccgacttgcgacttttataaaatatggtcacgtctttataaaccatataatagcaagacttggagatttttatggaaaaaaacacacataacaacaaggtaatttgcaatttcaaattcctcatcaataattatttctttcatcttatttttttggaatatat

SEQ ID NO: 301266 - DNA, 404 bp, Glycine max
agctttgagcaacttcaaacaacaacaactttttactcggatgtctgattgagacccgtaatatatccagacgctcgaaattgaataccgaagctctgagcaaattcaaacgacaataagtttttactcgtatgtttgattgagcctgtaatatatcgaaacgctcgaaattgaagaccgaagctctgagcaaattcaaacgacaataactttttactcggatgtctgattgagtcccgtagtatatcgagacgctcggacttgaatgccgaagctctgagcaaattcaaacgacaataacttttttcctcggatgtctgattgagtcccgtaatatatcgagacgctcggacttgaatgccttagctctgagcaaattcaaatgacaataactttttactcgg

SEQ ID NO: 301267 - DNA, 438 bp, Glycine max
  unsure (1)..(438): unsure at all n locations
tcaacattaaatntcgagcgttccgatatatttgtggactcaatcgaacattcgagtaaaaagttattgtcgtttgaatttacttagagcttcggtcttcaatttcgtgtgtttcgatatattacgggactcaatcgaacatacaattaaaaacttattgtcgtatgaatttgctctgagtttcggtattcaatttcgagcgtctggatatattacgggtctcaatcaaacatccgagcaaaaagttattgctgtttgaagttgctcaaagcttcaacattcaatatnaagcctcgcgatatattacggactgaatcagacatccgagtaaaaagttattgtagtctgaagttgctcagagcttcaacattgaatatcgagcattctgatatattacgggactgaattagacatccgagtaacaagttattgtcgttt

SEQ ID NO: 301268 - DNA, 408 bp, Glycine max
  unsure (1)..(408): unsure at all n locations
agcttgtgcgaatcanatcactcctgcattntatctctagcatgcattctttntttctttacccactcctcacgtttggttntttagggaaaaacaccataactaaacgcgccacaaggcatccctatcgcaccagatccaaatctcaacgatgggtgatcaagaggagacacaggaacagatgaaagccgacatgtcggctctgaaagaacagatggcttccatgatggaggccatgttaggaatgaggcagctcatggagaaaaacgtggccaccgctgccgctgtcagttcggctgccgaagcagacccaactctctgggcaaccgcgcgccatcctccctcaaacatagtaggacggggaaggaacacgctggggcacgacggcaacccttatctgggatacaa

SEQ ID NO: 301269 - DNA, 461 bp, Glycine max
  unsure (1)..(461): unsure at all n locations
agaattatacaataacactttgtgcccaaccatgaagtccttcttaattatcatgctatcatggaacttcttggtcttttctttgtagaacttggcattctcatacgcttctaggcggatctcatctaactcactcagttgcaactttctttcctcgccagcttgatccatagagaagttgcaggtcttcactgcccagtatgctttgtgctcaatctcaactggaagatgacatgcctttccaaagacaacccgataaggagacattcctatgggtgctttgtaggtagcctatgtgcccaaagagatcatctagcctggtactccaatctttcctgcttggctgcacaatcttctctaaaattctcttgatctccctgttagaaatttctgcctatccattggtctcgaggtggtatggtgtggataccctgtgtacaaccccgactttttagcaacgn

SEQ ID NO: 301270 - DNA, 279 bp, Glycine max
agcttgtattgtagtcatacctcacacaatatatgtatgtgtgtataggtagtaaaaataccttggatatgcatgtatgtaatttacgtagcacaacaatacctcacataatatacatatgtatgtttaggtagcaagataccttgccctgcatgtatatagcaacaatatatatgagtatgtttaggtagcaagataccttggatatgcatgtatatagcaaaaatagctcacaaaaatatacacatgtttaggtagcaaaataccttatgagaaaaa

SEQ ID NO: 301271 - DNA, 465 bp, Glycine max
  unsure (1)..(465): unsure at all n locations
agtaattcgatgatatgtatatatatatatatatatatatttaattatagcagtactcataaatgtgtcatgtagataaatattatacatatatatatagaggtgcataaaagtaactaaacacattaaatatatatgtaagtaatcaaatgtattatgaacattaatatatatatataaaagtgcgtagcgtattaaaaacattaatatttatatattgacaccttaacggaagcatatatatttatatattaaacacgttgccgtaaacaatttaaacattataatantctcctccacatacacatttgaaataataacgtaaacgggtatatatatatatatagatatatatatgtatatatatatatatatatgtatatggacatatatacagtaggagagcatattatacatgttgctatatatatagtacctgcctcaatacacacctccatatttccn

SEQ ID NO: 301272 - DNA, 160 bp, Glycine max
agagttgagaaataattttttaattatgagattaatgatagtttggtagttaaagtattaaactaagtatatgtttaaaaggatatgagttgataagtttgggcagaagatagattatgttagaggataatcttgttatattctactttttggttttttt

SEQ ID NO: 301273 - DNA, 395 bp, Glycine max
  unsure (1)..(395): unsure at all n locations
agctttctcctaagtcctaaaagacatttcaagctaggattaactcactttaatctccatttaccacagaatccagatttaaccttccaactctcaaagtctcactctttttccactcacaacaccacattctcactttctaacctaggttaactctacccttcatctctaacagtttccataggcaatttcagcacataaacatcacaagcatcatcatgaaaaccctaaaactgaatgggtatgtttaactcatccaaacatggcaagttcaacatgctttcaacaagtttcttcacaaataatcatcataaagcagaaacctagcaagactacccatcatatctcccanaaccccatacccacgannatcaaaggagaaagaagtccaccca

SEQ ID NO: 301274 - DNA, 393 bp, Glycine max
  unsure (1)..(393): unsure at all n locations
tgagatgaggaagtgttgaagggtgaaacttcctgcttttattgttgaccacagagtggtacctggagatatgtcgcggcggtcaggagaccttgnggacgtcaggtggggtgctattgcccaaaaccaagcttgaccaatcccgtcccaacccgggcatagtcggtcagtgagaacctgtgatgtacctaagcacgtgagctcctagcagtcaacagataaaaggaacaaagaccacaaagcaaggaggcttgtggtggctggccagctgtgaactttgattgaccgcccgccatggcctcggtaatcgattaccaagggtgggtaatcgattacaaggctaacaacatgaagacaggaggctaagatggtctctggtaatcgattaccacg

SEQ ID NO: 301275 - DNA, 456 bp, Glycine max
  unsure (1)..(456): unsure at all n locations
cgaacggggngnncgtagactccctgtaactcacgggaattnagaaagtactcgggatcctatagagtcacctgatgcatgcaagcttgtttgataaagaaatgacgaccacgaagataatgctggagtagtcttcacatgccaatatattaatggaatacaaaatgtaccatgaggcgagctggcactattacattattatcgcggatgcatgacttatttctgccccccaccaccaccctacttttttttaatctttttcattaatttcattctcatttccttagtgttccgcttctacctctttcttcattttttctattctcaaactacgtgtcttcaaaatttgtttactttcctttgtaatactactattaagatctgtttcttgaatattgtcacgtctgcttttttagtacactcatactttcatttctgatcctccacccactgtcc

SEQ ID NO: 301276 - DNA, 404 bp, Glycine max
agcttggtagttggaacccgaaggcatccctttgttgaagacatcgtggaagttcaccccttccttcttggaagggtctaacgatggacaaatatgatggtgtcgcgggtccggataagtagttggatgtctaccttacccaaatcaactatacataagcgatgactatgttttatgtcgaatcttccaaacttcattgaagggcccaccattgagttggtttacaaaaattcctctgtacttcatcaatttgttcgacaccttgataacccaattcgacacttagtttgttgcaagtcaaccctatcacttgacttctatggcactggtcaatattaggcaagacaagaagaaacctattagaatgctcaacgaaaggttcaacaaggtcacccttaatatta

SEQ ID NO: 301277 - DNA, 458 bp, Glycine max
  unsure (1)..(458): unsure at all n locations
tcatgattgaatcaagaatgagtcatgaatcaagattgattcatgatgatgaatcaagattgattcaaggtgttttgatgataataaagatgatgacaaaaagcccaagagaatgacttcaagattcagtcaagaacttcaagattgagtcaagaacaattcaagaatcaagtttcaaatttcaagaatcaagaatcaagaataatcaaaatcaagattcaagaatcaagaaaagactcaatcaagataagtactataaagttnttcaaaacattgagtagcacatgaagttttgacaacttctcacttaccaaagagtntactctctggtaatcgattaccagaatgcagtaattggataccagtgttgtcaaaatgttaagattttcanaattcacaatgaagagtcacatctgttgatgtgtaatcgattacaccttaatggtaatcgattacca

SEQ ID NO: 301278 - DNA, 410 bp, Glycine max
  unsure (1)..(410): unsure at all n locations
agcttctatatattaatgaataaaattatcgatgcatgtgccatgttatttttgccctctcacacgcagttctgaacctccttagggttttgactaatgtccactttgttcttctttttaaattcctatacaaaatgggtcaccattccctttcaaagtcatgtccaccttaagtgagtgtttccagcaatagccttatcttggaatagcttatccttgatcgttagaagtacaactgccaaggtgaaacatgaaaatgttttgctctccaacgcaattagtcttgttgtcaaggccatgtggtcagcaactactgaatataaagcagcctcaatagcagcggcttctcttaactctccttcaaccatctttatcttgttntccaagtagtcaatcttgttgtctaaaat

SEQ ID NO: 301279 - DNA, 393 bp, Glycine max
ctgagatcaatccatctatgtatcatgtttgattcacactaatcatggataaagaagaactaagacttaatctatcacttatgcctaaactaacagcattcaatacaaatgtcatatcttttaaaacgtttttgacattgtaaaatcatagaaccaaaaacctagactaatcttcaagacttcaaaatctttgattcaacaatctccccctttttggctttgatcatgccaaaccaaatgatgtgtattgatattctccttgtccttttacctgttctacatcatgctcaacaaacatcgcagcactatctagctcatcatagcatctaggtacatacacaatcaatcatatctttctcccctctttggcatcacacaagcaaaaagtgagta

SEQ ID NO: 301280 - DNA, 148 bp, Glycine max
cgagatgagcttttattcatggcatgacatcaaagctataaaatcacggacaactcgaatgaaacatatcattatggccttccaagcaatgtctactcaagatgatcgcaagtacacccccccaccccttatagtccactcaattttt

SEQ ID NO: 301281 - DNA, 251 bp, Glycine max
  unsure (1)..(251): unsure at all n locations
agctttgaatgaaagaagataatgacgaccacgaagactaatgctggtagtagtcttcaagtgcgaatcatatcaatggaagacaaaaggtaacaagaaggcgggcgggcacttatcanattatcatggggatatattatttatatccctcacctttatgatatacttttttttcattttttttatcacaatcattttttcttttctttccggtccaagttttttcttctaatagaccattttttttaata

SEQ ID NO: 301282 - DNA, 449 bp, Glycine max
  unsure (1)..(449): unsure at all n locations
tgcatgatttacattctccgcctttctcaagcaaattcttaattcttcttgacatcatcaaaatcttcatgatttacattctccccctttttgatgatgacaaccacctgtaggttangagcaacaacaaagaaaaaatatctatttgcatatagtttactcccccttggttttgcaatgattgcttatatgagacagttgaagatttcatatttttcatatgtaaacaatttctcataaacaatagatcatttttcttactattttatcttttatctttctcttccccttcgccaacatcaaaaacaatcatgaatagagaggagaaagatgttaccacttgttgcaatgtatgagaatcaagtgataccaaaaggcattaaaacaatcattcaataataatgaagcacaaacaagtacaataacacatcaatcaaacacaatcaaat

SEQ ID NO: 301283 - DNA, 388 bp, Glycine max
  unsure (1)..(388): unsure at all n locations
agctttcaatcttatatatcttatgcgtgtgcttcgttttcttcatgcataaccaacaaaagtattgacttatgtcagacaaaaatctattaccacattattagttgtataattaagtacaaaagtgagaggaatttggttgctatcgcaaataatcttaataccaacaagtgtccaaaagttaagaagtaaggaccactctaaaataatcgcgccatacctatatcaaacatgcatgatgtacctgtctctataagctggcattgccatgtcacttcaaacactttntgttacanttttagtttctttcaaaatttataattaaatataaataaaaatactacaataactaaatatataaatgatagtattccattaactaatatta

SEQ ID NO: 301284 - DNA, 412 bp, Glycine max
tgagctgaccgttaagcgaggtgatgtgctggacttatcttgtacgctaagcgagttgtcccaatcttcaactttttcttcacagctttttctttacgttttttcatcaatcttcctataaacacttgtaatttttcttcttttaaatactgttggtaaaaaattaacatgatattaaattcctcattatttcattaaaaacaatagtaaattaaaagaattctaatcattattagtcaagatggactatcaattatacttaacattcacagttatcacatgacctgcaccctccaacaccatgattataacttgctgtgtagttgtcaataatatgactgttgtcgatatccattgtgccacaaccgacattgtgaccatcgtcatgaacatcagtgctgtaccaacatga

SEQ ID NO: 301285 - DNA, 344 bp, Glycine max
  unsure (1)..(344): unsure at all n locations
agcttgatcttttagttntttatctctaatctttaatccctgaacgaactattcaagtttgtaattcgaactttaattatcttttaattcgttcctaaagatagatcgccaaatctgttgctaactgcacattaatctgttaaagactcacagattcatgtgtccagtattttcgggcaagatgtcctggacatcgtatgcgacattcgtggatcctgcagcttcaattcttcatttgacattttatcttgccttgtgcattgtgcaagccaatctgactccttgacataacgtggacatcatgtgcagcaacttcagctttccttcaatgtctaagtgcttat

SEQ ID NO: 301286 - DNA, 399 bp, Glycine max
  unsure (1)..(399): unsure at all n locations
tcagatntcagagctcttcagagcacaaaattcatgctcttctcttcctctcccttcattcatctccttcttactccaagctcttatccatggcctcctatggcggcgagcttnttctagactcatcttctccttgaagtggtgtctcctctctcttttccttctccattccgccggcattcatcttccaagaagaaaaggaatccattgatgaagaagatcctacgcctacaagctccaatggagcttacaccatgtggtatcaagagcatctccatctaggggatgttccttcgctccctctatcttctgtccggagaaatctctntaattacttggtcttcatcttattctccatgtatatcctccattatcttgtgagatggcgctgtctagagt

SEQ ID NO: 301287 - DNA, 295 bp, Glycine max
agcttgaacttccggctgtgcgatactggtgaaaaattgtggcacagtagaacttgaataatcctccacggttactcttcttggctcttcagccatgattgggtcttcaacaagttctatatgagaatgccctgcaataggcaactagaagatgcctcggaagatcgaggttattcttctagagttgtcgatgcttctaaatcctgcaaaaaagttctgattctctctgaactacgccttctacaagtggtgttaatctccaaatcaatgggaatcaaatcacctacagtggatc

SEQ ID NO: 301288 - DNA, 326 bp, Glycine max
  unsure (1)..(326): unsure at all n locations
tgcanaatgggtcggtcaaactccgagtatcgaccagattgtagaacagttggtcatgagctgacctaaggtacataacccctcaatctcgaaggcaaagcttggagagactaacaggtgtaaatgactcagtatttatataatcgaaggatacacaatccctcagtctcaaaggcaaagcctataaagacgaacaggtgcacatgacttggtatttatacaaccggagggtatatagcccctcagtcatgaaagcaaagtctgaagagattaaagtgtaaagaatcccatntacacaactggatgtacatcagccatcagtcttg

SEQ ID NO: 301289 - DNA, 369 bp, Glycine max
  unsure (1)..(369): unsure at all n locations
agctttgagacgcatgtgaaccttnggcatcatcaaaacattcagcttgatcctttgtctacaaatctctttcatggcctaccgaatgaagacccatatgctcgccttgccacatacatagagatctgcaacactgtgaagatacccgacttccagaagatgccatcggcctcaacctattttctttttccttggccgatgaatcanaaagatggcttcattcattcaagggggaaggtggagatctcatcattccaccaattccctgatgaatcattaagtgaagctctagaccatttatatggcttactccagaagactccaacccatgggttcaacgagcccggttagctaaatatattcattgat

SEQ ID NO: 301290 - DNA, 126 bp, Glycine max
tgcaactttcagaaccatgggagaagatgagtgaaggatctatagattaaattcttgagacaaaagggttagggttgagagggggtgggctgctgcacacaaaagaaagataatggaagttttgag

SEQ ID NO: 301291 - DNA, 409 bp, Glycine max
  unsure (1)..(409): unsure at all n locations
agctnttatgtgaaaagatgtgactcttcgcatttgaatttgaatttcaatgttcaaaggtactggtaatcgattaccaaaacattgtaatcgattatagctttttgaaaataattggaacgttgtaaattcaatttgaaaacttttcgaaacaattttgctactggtaatcgattacaacaatctggtaatcgattaccagagagtaaaaactctttggtaaaaggttttgtcaaaaactcatgtgctattcaaatttttgaaaaactttttaatacttatcttgattgagtattctcttcattcttgaatcttgagtcttgaatcttgatcttgattcttgagatcttgaaccttgaatcttgattcttgactctagactntcttcttgagtcttgaattcttcttg

SEQ ID NO: 301292 - DNA, 435 bp, Glycine max
tgttacaaccagtattgtttatcctaccaaatcaggctcatacacaaagaagaagatatatttgtttgattgcacagtgactaacactcaatcgtattacagacagataaacaatcttagcacgtactcttttctctcaaaaaaatcaaggtattttgagagctattttaaacttcaaaagaatttacataaagtgatttttacaaaaaagaatttgaatgagtgctttagttggttcttcatgtcttcaacaagtgttcaatgtctctaaatggatagatttctcctcttaaagctcgtttgaaaaatgtggcattgggcatttaatgcttgattgctagcatgtacttcttcaaaaaccactattctttgctaacatgttgaacacttcaacaagaaatcacttccttttgtgtcagagcatgtttgtatagt

SEQ ID NO: 301293 - DNA, 285 bp, Glycine max
  unsure (1)..(285): unsure at all n locations
agcttatcggattatggngcacccgtcatttgtggtactaggtggcgatcgggcgatggcacaaatcaactatcccatttccacaagtcaagcataagcacaccatccccaattgcccacctttaaatntagctcacgtgcacgttgtcccttctcctcattcctctcagccccgggtccccatcaacccctccaagctttcacaatatctagacaattcaaattcatttgtcatgaaactaccttaaacaaagaaaaataaagtggaggcagaatctttgcaca

SEQ ID NO: 301294 - DNA, 463 bp, Glycine max
  unsure (1)..(463): unsure at all n locations
tgcatgattntacattctcccctttctcaagaaaattcttaattcttcttgacatcatcaaaatcttcatgatttacattctccccctttttgatgatgacaaccacctgtaggttaggagcaacaataaagaaaaaatatctattcgcatatagtttactcccccttggttttgcaatgattgcttatatgagacagttgaagatttcatatttttcatatgtaaacaaattgtctcataaacaatagataatttttcttactattttatcctttatctttctctctccctttgtcacatcaaaaacaaatctgaatagagaggagaaagatgttaccacttgttgcaatgtattagaatcaagtgataccaaaagacattaaaacaatcattcaaatttaatcaagaaaaaataagtacaataacacatcaatcaaacacaatcaaagacaatcaatcatc

SEQ ID NO: 301295 - DNA, 294 bp, Glycine max
  unsure (1)..(294): unsure at all n locations
agcttcattgaatgtagtattgatgtagctattgtcaaggaattctacgcaaacctctatgacctagaagacaagtcacctaagcaggtgagggtcagtggtcatctgatcaaatctgatgaagatactttgaacacttttctgaagactcagcgattctggaagagggggaaaatctttgtgcttattcccggtttgcactcctgaggcttgatcctcangagttggctgctaagctttgcatcccagggaggggattttagctaaatgttgatggtcagcctttgaagattt

SEQ ID NO: 301296 - DNA, 446 bp, Glycine max
  unsure (1)..(446): unsure at all n locations
tctacttagtaaatataaaaactaaacaacaaatatttacaatcctaccaaacagaaccatacattgggagaaatatatacatttttgaaaacttttatatacaaaagttagtcgtaaaagacgattaacagttttcttttcagatctttctattcttttcttgaaactcgggcaatcaactctcagatgtcctggttgattacattcataacattttggaagagaggatgaatcttctcctctcttctttggttntaaatttgatcttctttgatttgctttgtttcttaaaaatttccgcacctctttacgaaaaactgaaatcatcatctctctctatttcattcaaatcttctttatcacttccttattgaattgaagatgaagctntaagtgtgattgctntctttctcttatcattctcctcatgtcgattcagtctcat

SEQ ID NO: 301297 - DNA, 410 bp, Glycine max
  unsure (1)..(410): unsure at all n locations
agcttgtatgattatggggtacccatcacatgtggtactaggtggcggtcgggcgatggtgcacaacaagttttccacatccacaatgcgcgcataaacccaccatcccctgttgcccacctccatctaagctcacgtactcccatgtacccatatcctcatttctctcaacaccgggtccccatcaatcctctcaagcttccacaacatccaagcaaaacaacattcaaactgcacaagctatcacagccaagcaaaacagagcataggcagaaaactttgccaaaacaccaaccaaatcacagcttttctcacttaaagaccccagtaacaattccttcgttctggttcattaaccgttggatcgactcgaanattntactggaagtctctaatacttaagcctacat

SEQ ID NO: 301298 - DNA, 465 bp, Glycine max
  unsure (1)..(465): unsure at all n locations
tctcccttatttgctataaatagggggagaagtgaagaagataagggttcagcctcttangcacttctctctctctcgaaattgctgaggaaaattatttccgtgaagaanatccaagccgaggcgcttccgtaacgtttccgtgagaaattacgcgaagattctcgaccgttcttcaagattcatcgttcgttcttcgttttcttcaatcttcaacgggtaagtacctcaaaccgagcttttcaattcattctatgtacccgtggtggtccacattntgtttcatgtattnttattccgctttcattctcttttatacccccttttgacgtgcttaagtcatttatttaagtcatttctcgcttaatctaanaataaaataaatttccaccgatcgtttgaatagtatcatccgttaattntggctaaaatgaattccgaccgttcggtcgtgccgtaaccacg

SEQ ID NO: 301299 - DNA, 372 bp, Glycine max
agcttgcccgctagaaagccatcgttcatgcacagagaaaggagggacaaattgggaccgactcttagcaaacaaagaaagagcgtctgtcaactggttccctcgatggaaagaaggaagaaccggggttcttatttcatgcacggatttccgaatgttcccttgatggggacaaggggttgcatcagttacaatcctgttcttgctataaggcaacttggctaccctatgagaggggcaccgctagaggaagagctcgcgcctatcatttcacgaggtttcaataagaccaacgtggagacacttcagaaggtccgcaaggcatgggaggtggtgcaaaagaaggacaaagaactcagtggcagtaacaat

SEQ ID NO: 301300 - DNA, 377 bp, Glycine max
  unsure (1)..(377): unsure at all n locations
cttctttggaccttgaacaggcaactaactcctctttcanaaccatgctatgtgctcgcgactggtccctttcttccttgagttcactattgctaccccatagagctccgcgaaatttgttccgaccatactcttccttgcgagccctcttggtctcttgttcaaaggctcttgcggcaattgcattctcttcccgtaacccggcacactccttcccaacgtgtgtancggccaacttgaacttctccttggcaagttntgcctttcctaactcgctnntgagagccggacttcttcgtcctcttcagtggcttaaagctctctttgctgacgacttttaacttggcgagccaatctaaacctcgtacatgaacttt

SEQ ID NO: 301301 - DNA, 406 bp, Glycine max
  unsure (1)..(406): unsure at all n locations
agcttgtgaaatcaatggaatccaagattctgcttgacacaagtcgttcaattttgttcttagaaatgtgacctaagcgcttatgccataatgctcctgagtttgtattatcaattctacgcttagtaccatgcaatgagaattacacacgaagctacagtatcaagtaaatatagattatcattaaccaagagtgaaccagttccaacaatatctgaattaaaagacaacctanacacattgtttccaaatgaccacaaataaccgaattatgtccaaataagaaactgataccaaattccgtctaaatgacggcacaacaaaagtgtctttcagatccaaataaaaactagtacataataataatctaaagtgccctatagcgtccacttccaccgatttacca

SEQ ID NO: 301302 - DNA, 409 bp, Glycine max
  unsure (1)..(409): unsure at all n locations
tgaatgttaatagtgcattggagaagagagcgcgatagggtacacggagaagaagagagcggagcacaataggtcgcatcaaatataatttaaaatgtacgctcaacatcggttttcaataaaaaactgatgttaacaaattgatgagaacgttaacatcggttttattcaacaaaccgatgttaagggtgcttccttaacatcgattttttgaaaactgatattaacgtcgcttcgttcacatcagttctcttcaaaaccgatgttaaggaatacacattatttanaattacccaccccatttacgtaacatgcggtntgtgaaaaaccgatgttaatccgccgatgttaaatctggttcttctagtagtgaaccataccatcaatatttcagttgattgataaaata

SEQ ID NO: 301303 - DNA, 381 bp, Glycine max
  unsure (1)..(381): unsure at all n locations
agcttcaacattcaacttcgagcgtctcgttatattatacgactcaattagacatccgagtataaagttattgtnngttgaatgatctcagagcttcaacattcaatttcgagcgtctcaatatatgacgggactcaatcagacccccagtaaaaagatattgtngtctgaattggctcagagcttctacattcaatttcgagcgtttcgatatatgacgggactcaatcatgcatccgtgtaaaaagttattgtcgtttgagttggctcagagcttcaacattcaatttcaagcgtctcgatatatgacgggactcaatcacgcatccgagtacaaagtattggtcgttgaattggctgagagcttaacaatcaatttga

SEQ ID NO: 301304 - DNA, 457 bp, Glycine max
  unsure (1)..(457): unsure at all n locations
tcggctcttgatacaggttctatcctatcctattatttttctttgtaatttgtctaggttcgtgttttgtccttgttttgttatttgcgttcttgtttacatcttgtttcgttattgtttgcgtcttgcgttctattatttgcgttcttgctcttgtttcttgtgtctttcacactctgtgtccaaaaaaaatcgcaaaaaaatttgaaaaataaagtgggtgtttgatctttgaacacgaaattgaggcatttacaggtatttttttgganagaatatcgtggatcaaactccctattctacattctctctgaattctgagcattttgatatatagtgtgcctcagacggacaaccgtagcaaaagttatgagcattcgaagtttacttgccatatctggtatcttatctggtatcttatctcgtatcctatctcgtatcttatttgctatcatat

SEQ ID NO: 301305 - DNA, 400 bp, Glycine max
  unsure (1)..(400): unsure at all n locations
agcttggtttgaggtacttacccgttgaagactgaagaacgtcgaagaacggtcaaaaaccttcgcgaaatcattcacggaaacgttactgaagcgcctcggcttggattttcttcacggaaacaattttcctaagcaaattcgaacagagagaagtgcctaaggggctcaacccttttctacttcacttcttcccctatttatagaaaattgggggagaagcttgccaccaagctcgcccaggcgagcagggttgcttcctccagaagcaacagccttctggaggaatcttcgggagggcccaagtgggcctggttgctatttgcacccccacttttactaaatacaccaccttgcccttttttggagatntctttttttgaaagttacggaaacttac

SEQ ID NO: 301306 - DNA, 430 bp, Glycine max
  unsure (1)..(430): unsure at all n locations
tcttatccaaggctcatcttggtggtgaagctccttcttccatggcttattccttaatggatggcgcctcctctcacctcctttcctttgtcttccgctgcatctccatggtggaaaatcaccattaaaggaccccattgaagctcaaagatccagcctccatagaagccccacaagcaagcttccatcacacggacctagtacttttgcttacctttggctctggactgggtcgcttaattggtcgaccatgtgtcgtaggcagtgctctaacctttntgtggataagctgcgcggctctgcaggtggcgcggcgcgtctgttgcccgctgtcgtccaactccaagctgttgtggtgtcttgccttgcgcctgcttggcggccaatacttcttgatgaaagctcggctagtatggcgcctgatgacctt

SEQ ID NO: 301307 - DNA, 442 bp, Glycine max
  unsure (1)..(442): unsure at all n locations
ttgcgtagccgctcttggtgaagatataatcacgcgccacatatccactcttatgactagcatatttggagacactctagagacttgacatgaacataccttccaacacgatgatacgttcctactgtactgtttgagtgacgactgacaaggacccacacaccggacctggatgatacttcatacactactttatgataagtgagtatatatgataatagtcctgagcccgacgcaaaagataacactgcagtattattgcgcacttactaacttcacggaccagatatcacgcngataacaccatcagacaataattccaaccaagaggaaatcatgactacacatagcagacgcaataacagaccagaacgcaacacacacaggcccaagtacctaagtgacttcttataatgaccactggagatgcaaccccgatccc

SEQ ID NO: 301308 - DNA, 282 bp, Glycine max
tgcttctacagttttgtacgatatatcagccaattgactctgtgtgtcattaaactctaatatgcactcgcccttttgaacatggccttgatggatccgacgccttattcaatatgctttgctctagagcgccgaatataatttttggatagattgatccccttcatattgccacaacggatacgcatatgtacaagctctcagccattatcagagagttgctgtctcatccaaatgatctgtgcacataaacttccagcataaatatattccgcttctgca

SEQ ID NO: 301309 - DNA, 400 bp, Glycine max
agcttttgggctatcaatttgaggtcaaatacaagccggggttagagaataaggcggcagatgctctgtcaaggtgtcatggtgacctggaattttctgcgttgttgtcttatcctacttggctggatggagagaagctgttgccgaagtcaggcaggacacaatgcttcagaagacagtcaaagaacttcaaatgaatcctgatttgaaggctggttctactgtgcagcaaggtattttgttttatcagggtcgtttggtgttgtctcctaattcaccttctattcctctattgctgaaagagtttcatgagacacctatggaaggtcattcggggttcttgagaacttatagaaggttagcagctaatttgtattggccaagaatacagagatgggtc

SEQ ID NO: 301310 - DNA, 376 bp, Glycine max
  unsure (1)..(376): unsure at all n locations
ntaggctgctcaattgctccaaatagctgcatagaagggcaaagttcagtattgtggtcagcagaggagcataaaccacagactcttgcgacaggtacaaatttctgatacaagggcagctgggttaccaggttaaccaaggcatctagtttaccctcaagcttcttagtttcagatgatgaagatgaattcgtggctacctcatgcactcctctaatgacaatggcatcatttctggcactaaattgctgggagttggaagccatcttctcaattaaattcctggcccagtaggggtcatgtctccagggctccaccactggcagcatcaatcatacttctctccatgttactgagtccttcataaaaatattgg

SEQ ID NO: 301311 - DNA, 407 bp, Glycine max
agcttgtaaattaattaaatttgttatctttgtcctcatttcttggtagaggtccaatatggcagcttagttgtttatggatttattcatatagtaactgtgatcaggtgtcgagtagaattgcaccgggccaacaacaaccgtggaaaaacttgttacattccatattaaacaagtggagtatcatttaaagatttaattcttggtaaaatcagactgtttgccaattcaggaaacaaggaatgccctaagatgatgatttgtttggaaactggtattatttaacatcctttcttctcaatgtgactatgcaagtcattatgtcagcaaatattcacacttttttaaaatcttcctcttttgcaaagtgaaattcacttttggcttgaagcacatgaaaaatatgg

SEQ ID NO: 301312 - DNA, 396 bp, Glycine max
  unsure (1)..(396): unsure at all n locations
tgtagaatggctagacatgatacatgtcagggtttggtttggttcaaggataaaagggatgccccacattatttccatgacacaaatgcaaaaatgatgatttggaaactttatgcaaaactggtcatgcatgcacctatgtggacactcaagtgtcaaattttttatggtcatgtgatgctaaggctcacgactcatttcctctattttaaatcaacccaatgtttccaaaatatgttcttttatccatttgtgcattcatccgagtccatttcgggcgtncggcaaatttcacagcattacccttcaggtgtagacacattttccaaaaattggttatgatcaatgaatttttttcaaagaacagttggaagtcatctcttttcaaaagcatgt

SEQ ID NO: 301313 - DNA, 405 bp, Glycine max
  unsure (1)..(405): unsure at all n locations
agcttgatagcacgcagagattaacgtcgtctcatgcgcccttcgtcattcgcggccgacaagcccgttgacacgcggagatttacataatcttccgcgctcacaagatatgtcatactgacttttgagtcacgctgacgggccgaatacccgagtggttatccgtataaacctttttgctatctgtaaaacgaaaagcctgatagcacgcagagattaacgtcgtctcctgcgcccttagtcattcacggccgacaagcccgttgacacgcggagatttacataatcttccgcgctcagaggatctgtcatactgacttttgagtcacgctgacgggcagagatacccgagtggttatccgtataaacattctttcttgctatctgtaagacgaanagcctgat

SEQ ID NO: 301314 - DNA, 451 bp, Glycine max
  unsure (1)..(451): unsure at all n locations
tgtaatcaaggaaatcatggttattgcctcccatatacaattccagagaggccatggnggagggaggaatgaagatgatgggtaattctagcccacttcggagactcgagttagttgggtagggtcaagaaagaaattctgagagagaaagaatgaagatgataacgaggaatgaagacgaagatgattggtttcggaacatgcatatttatactgaaacagaaacaaatttcttgtgattcagcatccaatccattcttttcttttctgggagttggaagatgcagcccacatgccgganatgaattactatcactattcttanaccagtagtgtaccatttcattacaatttctggcatctatatacacacgcctaacccacctttgcccatacccttttcatgtttgaagaggtaacataccaagctatgcttgagtgggttactttc

SEQ ID NO: 301315 - DNA, 212 bp, Glycine max
aggaatagcgaccgcgagacactggttatgcatccttccttgaaatctggttgctcgacagccccacgcagctgagtcgatcaatcaatcagctcccacccctgaaaagctgcatgttccgtgaaaaaacatttgatcgacacaccgcacacatctctcctcatacgacccatcatttggcccccccacccccgcccacatcaccgcattat

SEQ ID NO: 301316 - DNA, 506 bp, Glycine max
  unsure (1)..(506): unsure at all n locations
cggncggcgggntttgagaccttgccantacccacacttttgataatnnaccatctgagctgtgnanaggantgaagctatgataccacctgttgtacttgtgggcttacatatgaataagaaaggggggggggttgaattaagatttctcaagctattcccctccgtattgagtttgcttggatctcgacccgagacctcggaggccttgtaacgtgaattcctaaatgtgatangatctgcccctaccggtagaagcttttatgttatttatatgtatgaagtgctgggactatgatatgcacacgcgattcttatattgggtcggcatagtatcttgcgtaagtccaaaccccaagagatctcgctcggatgtgaacattataacatgtaatttaaacctattgaaacagacgacgaaaacttttctttgtctcggagggcttcgaaaatagagggaggtgttgaccacgtttcgaacgatgagattacaagagcgtccgtcg

SEQ ID NO: 301317 - DNA, 135 bp, Glycine max
gagcctatgttcccctttctttgatttgaagctgattaccagccttacgcgacaaaccatgatatcaccttacccttaaagaatttcggagctctggaattgctttgggaataagcttcggaataagcgtgtgtg

SEQ ID NO: 301318 - DNA, 425 bp, Glycine max
tgcctgtccgatgcagcagaaatgatggcctaagtgatgttgtggagtggttacgagcccgaatgggtgtaggcaaggacaacggcagaataactagcctgataaatgcctaagagaaatcatgggaagtatgggttaagctataaacccactcacgcagatataaacagaaggattgcgggaccgcaaccaccgagtcaagtcttcgcggttgaaacaagaaggcgaaggaaacccaccctgccacataagtaggagctttataagcgtgggtctaggggacgaacgtcaagttgttgcaatatacgaagataatgttccgagtgcattgaatctggtacgaccgtgctctcctaattctcgactaagaaaattgcgagtggaggagcgcccggacattcacgcaacaagcataatgtacacct

SEQ ID NO: 301319 - DNA, 306 bp, Glycine max
tgatattattattatatcgagtgaaagggacaagctggctgtggatgtgctgaatatggatttggtagccactttctaagttcagcatctttttagaatttacgagagcattcgttgaaaacataagtgctggacaaatctgtctattaaattataccaaatcatgtttctggccataaattctccgctcccttaaacattctgtactgttcttatctttaaatattttcttcaattctttttataaggtttatcgacacttaaattaacataatccaaaataatcatgatccgaagaattggata

SEQ ID NO: 301320 - DNA, 293 bp, Glycine max
atggtgacactatatgatgggatcaaccatatcatagcatactacagaatctaatattgctctataatctttatattctttcaacgaccgatcgctagtgtactacacaagcattcaccatgtaaactgcttgcttctattacactatgtgggcgactctctcctatgcagatgatcacatattcctgtaatacaccgaaaggctaactttgtttacacacgaaaatgatcttcatgatgactatctacggagatataatgatgagatgtatagaatgtaatcttaaaaacat

SEQ ID NO: 301321 - DNA, 449 bp, Glycine max
tatggacttatggtttctatcttattgtgaaaattttctaggctttggagaaatataggcccttgaacatactagctatttcattgaaaggttggagaaagagcttgaagagtatcatcaacaccttgcaaagtttaaaaaagggaaagaggataccggtaaagatgttagttttgttccatattaatttaaaaaaattgtctatacaatgcttgatttagaaagaaaaatgtcataaacaaactcgttttcttgcctttctgtcctctgcaagttggaatatatcataacatttataataaattgtgatccagttgatgttttgaaagtgtggcaaagcacatccactagggattatgaaacagtttgattacactagacaagtataatttaaaatcaaaatgatgagaagagaataagtggaaaatgactaagctatataagtgttt

SEQ ID NO: 301322 - DNA, 457 bp, Glycine max
  unsure (1)..(457): unsure at all n locations
tagcaaccagccccaaacccaatttttgtcgaaaccaagtgtcatgatttctatattaccaattttgctagctgttgatgttgcatcatagttttgctatgtcatctacctttggtctcatctctttaccttacaattcaggcaattctatcattaccctttttcaatatatagaattggcaacaccccacatattaatccaggaaattccaccactaatagtcagcctataatccataaccaatgaagtcccccatctccaatttattccatcttctaattttattgtagtttctgcagatttaaaataagcgtctggttcttcgttttaacataaatctattgcttagcttataattcacccaattctgcctttagtcattntcaacatgcagaactatcaacatgcaaagagatctgattatacaaaagccaggatcaacagaaaacgtattat

SEQ ID NO: 301323 - DNA, 422 bp, Glycine max
  unsure (1)..(422): unsure at all n locations
gtacgtagtacgtagtgaagccaaaggtctgtcgacaagcataatttcatcatctctgaaggacaactgtttaatggtacatacgtgttcggtgcaaaactagtagcactctaaaaaaataggccgctgtcagaggccttctcattgactatagtttaaaaaatgcaataatgaagataagcatctctcgactggcgtaagaatatcaagtagaaaagaaaccattacatgtaagcttcggcggttatccataatcaggtcattcttgatttccctcaaacggttcccctcttttacaggattctgaatgtgtttgtgtgttcctcctgaagatgaatattttggaagtccctagtacacgtaaatttcttcaaaactttatactntgtttgggaagattagactgcaactggttcacttac

SEQ ID NO: 301324 - DNA, 380 bp, Glycine max
tcttatccaaggctcatcttgcgggtgaagctccttcttccatggcttattccttaatggatggcgcctcctctcacctcctttcctttgtcttccgctgcatctccatggtggaaaatcaccattaaaggaccccattgaagctcaaagatcaagcctccatagaagccccacaagcaagcttctctcccgtggaatcagagcacaagagcttcaagtaggtgcaccttaaacctccattaattatttttctttaccttctcttccattgttgattcttcatttttctccatgtatctgctcacatgtcttgttctaaatgttattaacatgattcgttagagtttccaccgattaaacttgctatagaagttagattc

SEQ ID NO: 301325 - DNA, 439 bp, Glycine max
  unsure (1)..(439): unsure at all n locations
tgtgatggatagcaaaaggagtatgagtttagtatatacttatgtgtggaaggaaaaaacctttcggccttatgtctccctaaaaccctcttttgtgctgaaatactttaccccaaaacacttctccttttctccaagaaacccaccattggagaaaccttaagctttggtgttgtgcaaaaagcacctctcccctctccctttagtttttgttgactgtcccttggtgaagtaatctacccctcttcctccctttgttccattttccgtttctcataaaacatccatgggagctcatgaccaagattgggttttggggttttgatttcgctcgtggctatttttgggtttggggcaatattgctgagatgaacttgncgctggagtcaagaaaagcttctcncttggacccaaagtcatcatttctcctctctctcac

SEQ ID NO: 301326 - DNA, 456 bp, Glycine max
  unsure (1)..(456): unsure at all n locations
ctctccccaattttctataaatagggggagaagtgaagtagataggggttcagccccttaggcacttctctctctttcgaatttgcttgaaaaaattgtttccgtgaagaaaatccaagccgaggcgcttccgaaacgtttccgtaacgtttctgtgaggaatttcgcaaaggtttcgaccgttcccgacgttctcattcgttcttcatcgttcttcgatcttcaacgggtaagtaccttgaaccaagcttttcgattcattctatgtacccgtggtggtccacattgcgtttcgtgtatttttattctcgtttcgtttactttttatacccccttttgacgtgcttaagccattntatttaagtcatttctcgcttaacctaacaataaaataaatttccaccgatcgtttgaattgtattatccgctaacttcggttaacatgaattccgaccg

SEQ ID NO: 301327 - DNA, 409 bp, Glycine max
  unsure (1)..(409): unsure at all n locations
gttcgattcattctatgcacccatcatggtccacattgtgtttcgtgcanttttattctcgttttgtttactttttataccccctgttgacgtgcttaagccattttacttaagtcatttctcgcttaacttaaaaataaaataaatttccaccgaatgtttgaattgtattatccgttaacctgccccccaacaattccgaccgctcggtcgtgccgcaaccacgttggaaatcaaaaagagataaaaaaataatataaataaaaaacaacatcttttagtaaaataaagcggaaaatcaattggacgttttctctctgggatctctcattcttaatcgaattgattaataactaaagcgaaactaacgctaatatcaactcgcctagtcaagctcgtccataaaaat

SEQ ID NO: 301328 - DNA, 415 bp, Glycine max
  unsure (1)..(415): unsure at all n locations
tgccacccagctcgcccaacatcacaacaacttttgaatcaaaggatcttgcttctatgacacatgctaagctatttgggaaattaagggaatacgaaatggactagataataatggttgaggaagaagaaatagacaaacagattaagggcttggccttgaagaccaccattctgttaagcgcgatagtaaaatgacaatgcaaaagggttagatgctaagaatctaaattttcttgtaaaatggttagacaaatttctcaagaagaagaagaagaattttgatgatagaacctttcagtaaaaaaagaacttcaagaagagtgaaccctcttcctcctctggctntacatgctntgagtgctacaaaacaggccatatcanagtagattgccccacctaccacaagaagcaat

SEQ ID NO: 301329 - DNA, 441 bp, Glycine max
tgagtgagccaccactactattattttgtatagtggaagaatctccatattggagaattagaatcgtatgctcccattactaccttcctttaattactaagtgtctatcttaaacttcacgaagtggaaaagtttgagttttcccaacacttctaacaaacattagaataaatatttacatctgccattccaacaatccagattttgtaaaataaatggttcctaacatttttctactattaattaaatttatttgaaataataaattttggtgggtgttactttaaaatttggagagtgatcgacaaattactaaatgaaaaagtgaaacttaataaatatgttgttttcaataaattctattcgataatataccctgttaagaagagtgttagagagtgcccgtcaatattcgtcttattttgtctcatctaccatttg

SEQ ID NO: 301330 - DNA, 318 bp, Glycine max
cgacacactgaccgctactatagcttgaacatgacacttatttcacaaccatcggtctttctcatcatctcccaaatgctccatataatatatttcttttcagcctcaaacttatcttatcttgctcaataaatgcgcgcatgatagggcactaccctgaatctgacataatactcccccccacactccatctattggttcgaatggatctctttgcattatacagcatcaccttatctttgaccttgttggcagcaaaccgaagacataccacctgtccaatccaattcttatgctagtcacttagctaccacctac

SEQ ID NO: 301331 - DNA, 314 bp, Glycine max
  unsure (1)..(314): unsure at all n locations
ccaactatttaatcgattgtcttacccgcacaaaacatgtgctaaatctcaatcaaacaaaatcctaattaactcttatagtgtgtccgcacggagaaactcacaactctaaaaaaatttaaattctaagaatttccaatattccaattgaaattctctcattctccaaactttgtgtttctccccccccctccaattatgagatgaaaaaaatgaatgaacaaaaagacaaaacatgattgctatgctagttatacgtattgctcctctatactcacactccatcgatattttangagctcacacggtgtttc

SEQ ID NO: 301332 - DNA, 438 bp, Glycine max
  unsure (1)..(438): unsure at all n locations
cgctactnacacgctatatctcttttgtaagactattaaacattatacatctcttacaatggaagacagaagatacacaatactactattcctaagaacacttccttctccttaataatgatcattcctactctctattctttcacagacatcactttcaaacacctaacgcattttcccccctcctccgcgcactgaatttaataggatggatataaaattgacacgagtgaccttcttactcccttgaagtgttctgtttcgcactcgtgatatcaccgtcaaaccgagtgtagctcccccacgttgagacctatgcgccttgcctcttgccacacacaacttctttgataagtctatcttaaagacttcccattcctcacaacgattatcccgattatactaccttacttggaacactcaccaaaacaaggtccc

SEQ ID NO: 301333 - DNA, 348 bp, Glycine max
  unsure (1)..(348): unsure at all n locations
tatcanaatctactcttctangaacttatagaaagcttcacattctatcttatgaataaggtctcaattaatctgaacatattgaatgacggtgtgtttgcgagaacttgtgtaggcctatcttatgacataaatgccggtgtaagtgtttggatgagctcatgacagtaacttacgatatgtncctccctcgccccaactaatttcaatatnctctataacatagcttatgaaaacaacttaaccgctgtattaaaacagtttaatatttcatcttcaattctcaaaatactttttacataagtgcctacatgtgtgtaattggataaacaacttaagaacttattc

SEQ ID NO: 301334 - DNA, 458 bp, Glycine max
  unsure (1)..(458): unsure at all n locations
tcaagagaccgcttcaacttcaagaagatcttggaatgtggcatattcaaagagtcattgttactccaaaagtctaggtcaaggtgaattaaggagagagattgcaacacaaaactttttcattcaatcaatgagttccataggcatggagtccttccaagaggtactaacttatcttttttagatcaactgccaatgtgataatacacaaagtttagatcattttagacctatttctttggttggatgtttgtataaagttttggcaaagattttagctaatagaatgaaaaatgtacttgataaggtgattgatcctagctaaagtgctttcctagaggggagagaagttctacataattcggtggtggccaatgaggttgaggatgaagtaaaaaggggaaaaaagtcatgtttgttgctcaatgtngcatttgagaaggccttcaacttgatgt

SEQ ID NO: 301335 - DNA, 457 bp, Glycine max
  unsure (1)..(457): unsure at all n locations
tctatggaggctggatctttgagcttcaatgagtttcttcaattgtgattntcaattctagagatgcaacgaaagatgaaggagaagaagtgagaagaggtatcatccactagggaaaagccatggaaggaggagcttcaccaccaagagacagccttggataagaagcttagagaggaagattcttggaggaaagaatgagagagagagaggggggaggcacgaaattgaaggagaaaaagagggagagaagttgaactttgaagtgtgtctcacaagttttacattcatcaaagttatgacaagtgttacacatgtttctatttatagcctaggtcactaactaaatgaaagcttccttgagaagctagagcttagctacacatacccctctaatatctaaggtcaccaccttgagaagcttccttgagaagttaaagcttagctacacacaccc

SEQ ID NO: 301336 - DNA, 456 bp, Glycine max
  unsure (1)..(456): unsure at all n locations
ntatactntntatatgttaaaatcttagggaatccttataatatatcaataaccaccacgaacacattctgtcagattatcaagagaggttatgaagaatacctagatccataatacgtagcggaattaacaattataaggagcaattgattggtgatcttcttcaaccaaatcattgttttccttgttgagacttcattttctcctcaaatggggagaagggaagttgtttcttgatttggtgtattggggaccacaaccatgctttgggtttttaacctattagagttttcattattccctaacgggccaaacctatttccacttttaagcccatattaattttctgatgatagcctaataggctcaccaaattagatcacttatattgagcccatagaanaatataaataactaatataaatgttataatataatatgtagcccacattaatt

SEQ ID NO: 301337 - DNA, 441 bp, Glycine max
  unsure (1)..(441): unsure at all n locations
ntgtataatctgagatactagtctacaatactaccagatcgaatttataaaaccatctttcttaaataattgaggttcataatcattagtttttttttaaatgatatatgaacagtgcagcttttttgtcttggttataattgcattgatccataccacttggttacgagcttgcttagaaactcaataattagagctacttgatattattgtgtaatttttttgaaactgattgcgaggacactgtcagcaactcagcatatattcttcttcttttttcattaactatcagcatatattctatatttccaaattttagtggacgatatataatagtttgatattttgattcatagtcttctatgtgtcagtgtatttattatacatgccccggccttttcttagctccgggaccaagttctacgtaaaatacaattatat

SEQ ID NO: 301338 - DNA, 403 bp, Glycine max
  unsure (1)..(403): unsure at all n locations
tatagatntaaccaatgcttctatctagtttatggttctattatcacttcagaatgtttgtctgaatttttcttcagaatgtttgtactgaattttatatatatttctttcttactgaattgtgcgtgtgcgtgtatttatttattatgtcttcagttgctcttatcgctgttcttttgtttcccccacctaccctttgtaacgaatctttttaatatgtaagctcattcttgctcgctattgtatttgctctttaatcattcgactgaccttttttggctggatgtacggactgcgttagtgagttccacttcaatccagtcttgaacatcgaactcgatcaaactatccatgtgcttattgactgagctgatcgaattacaacatcaaatatttttaccgt

SEQ ID NO: 301339 - DNA, 391 bp, Glycine max
tgccgccacggagttttccgactatgctcttgtgtggtggaacaagctacaaaaggagagagcaagacatgaagagccaatggttgatacatggacagagatgaaaaagatcatgaggaagcggtatgtgccggctagttactcaagggacttgaaattcaagctccaaaaactaacccaaggcgcacgggggcgaggagtatttcaaggaaatggatgtgctcatgattcaagcaaatattgaagaagatgaggaggtaactatggctcgatttcttaatggtttgactaatgatatccgtgatattgttgagctgcaggagtttgttgaaatggatgatttgcttcccatagcaatccaagtggagcaacaattaacaaggaagggagt

SEQ ID NO: 301340 - DNA, 226 bp, Glycine max
tcatgatgaatcacgattaattcaaagaagtcttgatgattattaatagctcaaagatcaagactgagttcaagattgaatcacgaacacctcacggttcccgaggaactttgatcttccgaatcaagaatcaagtttcaagattcaagcttccatgaattaagatctcgattccggaatatcccccccaccccagacacttaatagggaaagtatgaatttttct

SEQ ID NO: 301341 - DNA, 450 bp, Glycine max
  unsure (1)..(450): unsure at all n locations
tgggatactcctcgactnttatatcaaaatttgtttgacataacaagttcctccaagccaagctattaggcacgttaacgttcatgtccaccaatccattgatccactctatatatacttggtagtttttcattccctgcccgacacgttcacgcaaatgctcaaaagccacgaggatccgctccctcttctccgtaatgataacgtttcggcctctcattggtttttcaggcacgcgggaaagagattcttggatttgggaaaatgacagaaagatacatacccatgtgctgatggttgagttgagtgtgtttgaatgttcaacagtagtatgcctgagagagaattgtttctctgggaacaccatctggcatgtcatggctatatatgaatgatttatataagtactgcatgtatgcagccatattggatctttgtgggacatgggat

SEQ ID NO: 301342 - DNA, 408 bp, Glycine max
  unsure (1)..(408): unsure at all n locations
tgctgccaaaacaacagaagtacagatataatagatggaactgttggttaatatctactccatatcccccctgcaaagaatccaaactcgttcgacaattttatctgaatccgaaatagttactgtagactgtgtgtctatatatatatatatatatatatatatcaaaagacgttgggatcccacatgacaaatcagacaacaatttttgggagtgtgaaacatggctgttgtagtgcatggtggaagggaattaaggctgagtgtgattgacagacacaaataaagcgactcttcattttatgactntctccatgaaattaggtactattatgtccgactctctaaaattattagggctcctttaaaaaggtggcaagttttttttctttctttctcttttcaaat

SEQ ID NO: 301343 - DNA, 432 bp, Glycine max
  unsure (1)..(432): unsure at all n locations
tgatcaanacanaatctatacattcgaatccactcaattcatacaactctcattcatttcaaacacaaccattcatttcaaacaaaacaaaccactgaatatcaaattcaactagttcattgttcaaacatgcttttgtacaagctacacacactcaaacaacagaaatttaaaagactactccagcataactaaataactgacatgaactaaatagctgataaaataaactattcaaaatttgcaaaaatttaaaaactatgcaggattcaccatctctcccttgataatggggaaagtatctcaccagctcctcaaacttggctggatatttagccacaatcatgtttccctgcttgagctccaagaactccatctctttcttgttcctaacttcctcgggaaagtatntctncaaaaataccctcttga

SEQ ID NO: 301344 - DNA, 426 bp, Glycine max
  unsure (1)..(426): unsure at all n locations
taggctaaattaggctaaaactnttgtaagctacttgagttgagtctagtcttacatgagggatttgcggacgaaactcagtttaagttagtctaaacgtaagaggactgtctaaattgggcctggtcttacatgagggatctacggacgaagcttggattaatatggcctgatgagcatcgaggctaagtaatttaggctacaacatagaacataagagcatgattgattagagaaatatatttctatacatcagcttgtttgttagaaagacctaacatttctacctactgctatcatttttatttaccttgcattntatagttctagcataaaagtttagtttaaattctgtctaaaattatcacttatacatgttatctcaacaatgcttcaattctaaacttaagtcacgctaacattagt

SEQ ID NO: 301345 - DNA, 403 bp, Glycine max
  unsure (1)..(403): unsure at all n locations
nttaaagaatcatgctnctggaaaatcatataaattgtggtcactcttaaataaatgattggttaaaagtcacacaagataaataattatagaaaaataaaatatattaaaatttcacatcaattataaataataacaaaataaatttacaaactgcttttataagattaatatatatatatatatcatatatataatatatatatatatatatatatatatatcacatgattaataaaacattctctcctcttttccgctctggcctttgtgttattggagagagagatatcaaggcctcgccctctatatattatgtctgtctcctaattttaatgctaactcacacaaattacatgtctaaaaattcttatctgaataccgatagtgttctttcgtcaag

SEQ ID NO: 301346 - DNA, 461 bp, Glycine max
  unsure (1)..(461): unsure at all n locations
ntcacaacatccaagcaaaacanaattcatacagcacaagctattacagccaagcaaaacagagcaaaggcagaaaactctgccaaaacaccaaccaaatcacagcttttctcacttaaagaccccagtaacaattccttcgttccggttcattaaccgttggatcgactcgaaaattttactggactctctaatattaagcctacattgtgaccgttgggatctactagcaaacatccagaactcattctgtactactctttccacagccaaccacacacaagcatttttctgcacaaagccaaaattctgctgcacctattttgacagcaaaattctgcataagtgcagattttcgaaaatcacactttccctcatccaatattgccctaatcaattcctacaagtcccacatcatgtatcaatcatgtctaaaccaaagtcaagctttanagcacaac

SEQ ID NO: 301347 - DNA, 453 bp, Glycine max
  unsure (1)..(453): unsure at all n locations
ntntatccaagacactctcttggtggtgaagcttctacttccatggcttattccctagtggatggcgcctcctctcaccttttctcctttatcttctactacaacttcatggctaaaaatcaccattgaaggaccccattgaagctcaaagatccagcatccatagaagcttcttaagcaagccccatcaagtgtatcagagcacaagagcttcatgtaggtgctctttaaacctccgttaattttcagctataccttctcctccattgttgattctgcattctttttctccatctatttcctcacatgtcttgtgttgaatgttgttaacatgattctctagaattttcaccgattaaacttgctatagaagctagatttgattctctatggttcacatttcttgttcttggtctggaaccatgaattgtgttgagtttgggttcctttgag

SEQ ID NO: 301348 - DNA, 453 bp, Glycine max
tgaggaatttcagggaaccactagagatgctgctatcgctaccgaactaaacaagtgagcgcgcttagagataagggatgagtttataacaattggggttagagtgaacatgtgtagggatccttagaggatcaaactggggttaattttggggtattttatgcattttaatttttctagtacctgataactacaattgctcatgtttgatgggtcaattgatgccctgatgcaaaatggatggtttaattgagtgtttgactttgaatgttagaatgaggggtcaattcttgcatgttttcttgaaattgattaaggggttttgttccccatgatgtgatcacatgttctatgctattaaccgaatgaataagtgaatgattatatgccttatatgatggaagattgctattgtatgagaagtaataatatgttagtgagaaggtgttatga

SEQ ID NO: 301349 - DNA, 419 bp, Glycine max
  unsure (1)..(419): unsure at all n locations
tgcttgtggagcttctatggaggctggatctttgagcttcaatgaggtcctttaatggtggttttccaccatggagatgcagtggaagacaaaggagaagaggtgaggcaccatccactagggaataagccatggaagaaggagcttcaccaccaagataagccttggataagaagcttggacgatgcttcatggaggaaaagaaaggaggagagaaagagagaggggggagcacaaaattgaaggaagaaaaagggagagaagttgaactttgagttgtgtctcacaagactctcattcatcanaattacaacaagtgttacacatgtttctatttatagactaggtagcttccttgagaagttntcttgagaaaacttccttgagaagcttctttgagaaaacttccttgagaagct

SEQ ID NO: 301350 - DNA, 460 bp, Glycine max
  unsure (1)..(460): unsure at all n locations
taacananagaaaacaatagacagaagaaagctntacaagatggttgacctaagaagattatgacaacaaagaacactattatacaaggttggcatgttctaaccaaaatagaactgaaagactgaggttttttttttaaagttgttgattattctttgagttaatattctattaatttctaacccgccgtcgccttattcattggcaggtgtttattttaatgaaacaagttatgccctatacatgcattttgcatccaatgattgaagagatggatgaaattatagttgcgcaagccacggcacatgccggttaattgagaaattaatcccaaataagtataaaaattaaaatacatatataatgctntacaaaaatggcatataatgcctataaaagggagggagatccttgtagctaagcattccaattntcacgactatacttactatatatata

SEQ ID NO: 301351 - DNA, 420 bp, Glycine max
taatagaccctcgtggaggtacagcagtaagaagaacgtataaaaccattctagaagctaggggtggtgatgtaaacagactataggccgctaggattgttagttagctgttacgtaactaactacatgtataaaagccatgcacgaacccgtgaagggattatggaaataatattctcatttccagctagatctttctctctcctctcttctctcgtagaatatacagtctcgaggaatgctacctctagcattggtgctttcattgcatcctctccgccatggctgatgcaacacgatcaaagacaagcatggagcgttgggaagacgcgtttgcaaagctctttgcatccatgacgttaaagttcgacgaacttctcagccatataaatcacctagaaagcctccacgccaacaatc

SEQ ID NO: 301352 - DNA, 451 bp, Glycine max
  unsure (1)..(451): unsure at all n locations
gttcgattcattctatgtacccgtagtggtccacattgtgtttcgtgcatttttattctcgttgtgtttactttttataccccctgttgacgtgcttaagccattttacttaagtcatttctcgcttaacttaaaaacaaaataaatttccaccgaacgtttgaactgtattatccattacttcggctaaataaatttcgaccgttcggtcgtgccgtaaccacgttaaaaatcaaaaagaggtaaaaaataatataataatcaaaaagacatcttttagtaaaataaagcggaaaatcaatcggacgttttctctttgggatttctcattcttaatcgaattgattaataactaaagtgaaactaaaggctaanatcaattcgcctagtcaagctcgtccataaaaataggctcttgaagtttgtcatttcattntctcactaagtaaaa

SEQ ID NO: 301353 - DNA, 429 bp, Glycine max
  unsure (1)..(429): unsure at all n locations
tgattcgtgagttgattctaaccttggtttcactttgattattagtcaattaattcaaggaaacttccaaagaaaaatgcccgattgattttttttttattattttattcaaagatattttgattattttattattattttttcaagatattttgattatcctattattattttgctttttccgcccactcacgttacaacgtaaacgatcggttagattttactttaatagtgattaaacaacattacaataccaatgatcggntgaaattcattttatcatttattaggcgagataacggcttatataaactgttaaagcacgttaaaaatggaagagaagacaactaacagtaagcgaaattaaagtgaaagtacacaacaagtcgggaccactaagggtgcatagaatgaattgaaagattcgat

SEQ ID NO: 301354 - DNA, 332 bp, Glycine max
cggtgacaataattgggtgaaaataatacatcagatgaaagataaataggcaactgctcatatgcacaaaaagttcatttgtgggatcaaaacaacgtcaatttgtgaaggtattaaatcattcatcaagcgatatgtggagaaaaagaatagcctggttgatttcaacactactagaaaattccttttaacgcggttctaatatacatttaacgacggtagttgaaccatctttgaagccaacgacattaaaagtcattgatgtaccatgacgattatggaataaaccatcttaaaaaatatgtctcttctaagatggttcttatgtaaga

SEQ ID NO: 301355 - DNA, 454 bp, Glycine max
  unsure (1)..(454): unsure at all n locations
ggcctaattaacctgaaattgagaganaatgattattaaacacacaaaatggaagtactaagtatttattatctatacttaacaaaaaaatacttataacactacaaaataaccataaattggaagagtttgatacaatttacataagttttatacacaaaagttattcatatttaccgacgatcttcttacattcttattagcagcctcaactgccccattcatcttgggccgataagacgtggaattatggtgttggattttgaaatcctcacacactttcttcatcatattgttgtttaaattggtggcattatcagtgatgatctttntgggcaaaccatatctgcaaattatttccttcttaatgaacctaatcaccacattccaagtcacactagcatatgaagctgcttccacccatttgctgaagtaatcaatggtgactaaaatg

SEQ ID NO: 301356 - DNA, 448 bp, Glycine max
taatccatcgccactttaactaataaatgaaaaattattcatttaattgatactatgctaatcatataacaatgaatttgagattcatattacctcgtaaccaacggatacgatggtgttcaattaactcttgctgcaatgaagagcatgcgataccataccccagattgcaacaatgcccacagctaccatggttttggcatcagggtcagtggcactacacatttctctgtacatcgttgccagacaagtagagccccaactataccacctgactcggtcgagatcaaccaacacagtgaggtacatcaaatgaacctgatttcccatcttgtatggcattaaaaccccaccaattagctgcaaaatgtaagctctacaatgtgcttctaactacttgtgtgtcggttccaagtgaagcagtggcatattatcttgcaaccactta

SEQ ID NO: 301357 - DNA, 188 bp, Glycine max
tgatgtcgagcgtactgatgggtaccatgaggtgtcttctgtggtttgacccacgcgggtgtcgaagagactgcatgggcatctccttccttcctttatgcccccgttgtcccgactcttttggcattagccctcgcggatcaaacgtaatcgaaccttcctcttttcaacacctaatagctcccccc

SEQ ID NO: 301358 - DNA, 302 bp, Glycine max
acatttatctgtatggtgatctgcacaagaacatagaccacagactctcgcaacaggtgcagatctttgattcatggcaagctgagttactaggttgaccaacgcatacaattttccctcaagctttttatttttaataaatgaagacccccccccccacctcatgaacttctataaagacaatagcatcactttttgcactgaactgttcggagccggaacccactttctcaatcaaattcctgacctcaacaggcgtcatatcaccacaggctccaccattggcagcattaatcatactc

SEQ ID NO: 301359 - DNA, 434 bp, Glycine max
  unsure (1)..(434): unsure at all n locations
taatccatcgccactttaactaataaatgaaaaattattcatttaattgatactatgctaatcatataacaatgaatttgagattcatattacctcgtaaccaacggatacgatggtgttcaattaactcttgctgcaatgaagagcatgcgataccataccccagattgcaacaatgcccacagctaccatggttttggcatcagggtcagtggcactacacatttctctgtacatcgttgccagacaagtagagccccaactataccacctgactcggtcgagatcaaccaacacagtgaggtacatcaaatgaacctgatttccatcttgtatggcattaaaaccncaccaattagctgcacaatgtaagctctacaatgtgcttctaactactggtgtgtcngctccaagtgaagcagtggcatattatc

SEQ ID NO: 301360 - DNA, 592 bp, Glycine max
  unsure (1)..(592): unsure at all n locations
cccctcgtcacttctntcacagtcgacgaggcagtntgagagaaagttcaacacgtcacgctcacacatacccctctcccacaaccgcggcgcggcgcnnctgctgatacactcgtattacgtncactatatatactacagctacgcacgatcttgcacatcacgacaactacaacagtgtctgcttctcattaaagagtgcatcatttacattcagaacagggatgactatctgaccgaacttgtcgatgttgttctggatacctcctaccagcataagtctcaatgtatgataccctatcttcacaccataaccattggttgactgccctcgccccagcaacggccaactggacgtgtatacaagtagtttgcatccttatgaatgcgatctcacatataaaactcgcccttctatcttctaatgactcattcagaccttgcgaaactcacctcgaatgctctctcacccatctgactcgaagatgtattcttcctcacatcacctatccagactattccgagccacactatagccatgaacccatgctcgacatccacctgttcttccatatcgcccctccccccgccg

SEQ ID NO: 301361 - DNA, 514 bp, Glycine max
  unsure (1)..(514): unsure at all n locations
cgacggcgcngnnnncttgagacgctggtatgtacgcgcactatgaataatcatgtgcctcgagatatcactaaataagcaacgcgttagctacgaacgctctctatcgcagctaagctgacgcggacgctgtgctgcatgagattgtccacaactggtacctatttcgaggaatacgggccacgacctgtaatacggggttcaaacgcgatactggctataatggcgaaaggacttggtgtgcccacccgtcaacgctttgtgatattcataaagaggagatgaccacgtgttggtccatggtctgataaaatatagcctgaagttgatgacatccctccgtgcttctttattagcgtgagcctacgtccgtccgatgaacctatttgacactcatggggggtaagaggatcacatcatgcaaacctgntacgcgggctcacacggacgatggatctatggcttcatggagcgccttcaacggaacgttgccacatgatattcactagacacg

SEQ ID NO: 301362 - DNA, 318 bp, Glycine max
ccttcaagtcgcaagaacaatcataagttgaaatttggattcaaataccttgaaagtctggcttgagaaaaacagaagctgactctaaagggacttgaataagctcggtcaacagcttgtggctagaaaagaacataccaaaccaattagaacagatataaacaaccaaacaatatattcaggactcccctcctccggaataacttaatataagccagtgccataattcgataatcatagctcaatagggtaacaaacaatcacagtcacccacattggaatagctttcattgcagccgcaggactacagattcacca

SEQ ID NO: 301363 - DNA, 397 bp, Glycine max
gactactgatataattaaggtggaataacaaaaatggaccatatccgaatttcacaatatataaatatgagcaagtgtttccccaagtaaagtcatgagtacaacctcgggatacagatatatatgatgacaaagcaaatgaatgaatatacacaaacaaaagtattcaagcatatgcctaccgcatcaccatctataaaagaaaaggtcctaggctcaaagcaatcatctctaacaccaaatcagtgtggaaactacacataacataagtgagcaggcgtccacacataacatatatacctaacgaagtgatccacacctctagtcacagtgggtatccatcagctccaagtgtactcatcctcgagatggagcgtcgactccccgacctacatct

SEQ ID NO: 301364 - DNA, 406 bp, Glycine max
  unsure (1)..(406): unsure at all n locations
tctggtgggacatcttgacttgctctccaatctgacattcaccacaaattctgccttcttctattttcagattgggaatgcctctaacagcacctttgtcaatgattttcttcatgcctcttaagtgcagatgtccaaatctttgatgccatattctgacttcatcttctttggaggacgcacatgtggcgagtaactggtttcttgaggtgtccataggtagcagttgtcctttgatctgctcgccttcattagaacttcactcttctcatttgtcaccaagcattctgactttgtgaagnttacattgaatccttcatcacacagctgactgatgctgatcaagttcgcagtcagtcccttcaccagcagtactttgtccagactaggaagtccatcatggact

SEQ ID NO: 301365 - DNA, 488 bp, Glycine max
  unsure (1)..(488): unsure at all n locations
cgcgctganggngnttttgatgcantcgctagacccacgngaantatagaaactcacgctctgattgtatgtgatcctaaatggatcacaatctacatatttgctttgaacctgtcacttgaggcaatggaacataatgaaatctcacggacaaatctcacgcatagtcttgagtcttgaagggcacatgtcatacatatcagactaacgaatgtcctgccgccacgatccttggatctgcccccccctccgcattactagaataaaaataagacttaattttcaatctatactgcaaatctctaaaactgcgttatgcaacctccatctcattacgtatatgccccacccaggtctgcgatttcaccagactctatattttcacgaacatctcagcagatttaatctcgttaaaactcatatcgcaatcaaattataacaatattacgtccacctctgacctctgacgagacaaatgagggtctccg

SEQ ID NO: 301366 - DNA, 458 bp, Glycine max
  unsure (1)..(458): unsure at all n locations
tctagccanatggacttaccttgaattaattcctttgatagcccctttgagcctatgttccccttttctttgttttgaagctcattacaagccttaagggaaaaaccatgatctcaccttaaccttaaggaattttggagctttggaattgttttgggaataagtgtggggggttttgttggacacatatttcgtggctatgcttcatgatgtattttgggccatacttgatgtacattgtatactggttaaatgttggacatgctgaatgatatgctatttctcaaatgctatagttaaaaaaaacaaaaaagaatttagttgaatcaattcgaaaaaaagacaaagaaaagcaataaagttgagtgaataagatcttacatggaaaaagaatgatgagactcttggctctactctctgcatctaaatcttatctttaggttctcttatcttttctt

SEQ ID NO: 301367 - DNA, 312 bp, Glycine max
  unsure (1)..(312): unsure at all n locations
tctagccaaatggacttaccttgaattaattcctttgatagctcttctgagccttgtttgcctttccttgttttgaagctcactacaagccttaagtgaaaaaccatgatattaccatatccttaaggaattttggagcttcggaattgctttgggaataagtgtggggggtttttgtttnatcccaccactcgtttgtcggctatgcttcatgatgtattttgggccatacttgatgtacattgtatattggttaaatgttggacatgctgaatgaaatgttgtttcataaaggttaaagagttctaataa

SEQ ID NO: 301368 - DNA, 456 bp, Glycine max
  unsure (1)..(456): unsure at all n locations
tgttcctatcanatattgtaggacaataaagaggtataaggtgaggatggaatagttgaggcatagatacgatgcaagctcgataaaggagatgaaggctctacaagagagtctaggcacacttctcgtgtaggaggagaagttctggcagcaaagggaaaaaaatcattggcttaaggggaaccaactactagactttcaggccacgacatcacggcggaaaggaagaaacacattaaagaagctccaaggagacaatgaggttgaggttcatgatcaagatggtatttatgaggtagcaaaaaatattctactgatttcgttactgtctcgaataaggtttatgagccaatgttggaggtgataaattgttgcatcttagatgaagataatgagaaacttactgcaatgtttagtttagaggagtttatagaggtagtgtttcatatggataac

SEQ ID NO: 301369 - DNA, 415 bp, Glycine max
tctagcgtacccgctattggtgctcagaaaatcctaagaacttattcctcttattactagctattttgaattctttagttcctgaatgtacaaccttcaaattgttgctcgttcccgtattagttttttgcaaaaaagaaaattaatctgaaacaattcaagctgaatcgttatcgttattattcccagcaccatacgaataacagctaaacaagtaatttaaaatgtaacttttaaattatgtggtatttttttaattacaattctacttcaatatctaatcttgttaatctacttaggccgattgttaaatatcaatatgaatttaaaggtgatctactgataatataaagtacttgctaatcacaaattatgatacgtatcacttctaaatttaacttacttctataaatat

SEQ ID NO: 301370 - DNA, 456 bp, Glycine max
  unsure (1)..(456): unsure at all n locations
ctaatttcatgcacaaatgaagggataagactccaaaagattntttgttcacaaaggccaataagctttggtgtaggctctctttgacaaggctttgtgacactttcagtgacccccttggcagccaatttgaacgtgccaagccataccacaaatgggcatttttactttttgcaaaacaacaaacatggacggataagatttgccaaaaatgggtattttctccttttaccaaaaccagtaaatattatcttaattgcgtaggttattgtgttaatctccctaggaatacatgtacctagagtaatcctcatacagagaacactctcacacatagttaaattacactgtgctcagtgcataatgcaatttcactactgatgaaattntntatctaggcagtttccaatttatgtcaactaactaaataaattatttccacagaaaataaataaa

SEQ ID NO: 301371 - DNA, 448 bp, Glycine max
tgtagatctttaatctccaatacttcttcacaagtttatcaattcatgatgataaaatgagtgattctttgatcaatctttagactaattgcagtgttattcttttcgaagactctcttgaaatgtttttctctaaatttgaacaaatcaagagtatttttaaaagaaaacacataggggttctataaatttgacagttaaaacagatcgaatcgattatcaaacaaggtaatcaattaattcaacaaaatccattttgttttgcatttctagaaactggttaatcaattattagatagggtaatcaattaattcattttagtatgagaatatttgtaacgatttagaaacatttaatgttgttacattcttttagggtagaaaaatcattatgcccattctatatattactcagactcaacacacagcctagagaggtggtcgacta

SEQ ID NO: 301372 - DNA, 456 bp, Glycine max
tgtaggattatggggtacccatcacatgtggtactaggtggcggtcgggcgatggtgcaaaacgattctccacatccacaaatcacgtataacccaccatcccctgttgcccacctccaactgagctcacgtactcccacgtagcccttatcctcgttcctctcaacgtcgggtccccatactcctcccaagttccacaacatccaggtaattccacatccaatcatcatggactaacaaaaccaagcaaaacagggcaaaggcagaaaactctgcccaaaactcacaccaaaaatcacagctttttctcacttaaggaccccagtaacatttccttcgttccaattcgttaaccgttagatcgactcgaaaattctactggaagtctctagtccataagtctacattttgaccgttgggatctgctactaaatgtccagaaccccatatgtacta

SEQ ID NO: 301373 - DNA, 458 bp, Glycine max
  unsure (1)..(458): unsure at all n locations
tatgctgcanatatttacaatagacctcctcaacctcagcagcaaaatcaaccacaacagaacaattatgacctctccagcaacagatacaaccctggatggaggaatcaccctaatcttagatggtccagccctcagcaacaacaacaacagtctgctccttccttacaaaatgttgctagcgcaagcagacatacattcctccaccaatccaacaacagcaacaaccccagaaacagccaacagttgaggcccctccacaaccttcccttgaagaacttgtgaggcaaatgactatgcagaacatgcagtttcagcaaaagaccagagcctccattcagagcttaaccaatcagatgggacaattggctacccaattgaatcaacaacagtcccagaattctgacaagctgccttctcaagctgttcaaaatcccaaaaatgtcagtgccatttca

SEQ ID NO: 301374 - DNA, 374 bp, Glycine max
  unsure (1)..(374): unsure at all n locations
tcctcgggccattcctgcgagagacaacattcggaaagtttagtttaccagagggacattactcttaaaacaaagatggcatacaacctcttcccatacacatgaatgtctatgtacagccagcttatgcgtatatttccttacaaacgccccattgcgcaagacattcttttaaataagcccctcgcccatatacaatcaaggcagcttngttacctagattatttacatgtacttcccaggtgtatttgtcacttacatcacacacatctccttgggtaaacttacatgcatgcatactcagagcattttgcggtaccacaaattgcacatgtgcacatccttggttttctaatacctatacctacccaaac

SEQ ID NO: 301375 - DNA, 448 bp, Glycine max
  unsure (1)..(448): unsure at all n locations
tataagcttgaccaacacatcaaacctcanagaacaaataactacaaaattttaaacagtaataaacataccctaaaatgatagaggcttgcaccgaattttgttctgcatgttttccattggatgtcaaatgtagtttgtcttcgaagacatatccagaacttgaggtattggctgagcctactgcacgcataagggcaaggatccttatagcctttgcaaacggaatggacatcacacaacttatgaccacaaggtagatgtctgctggtgttggataatgatggtctatactgattcagatccctgtcctgcattacagatgcccncatataaaagagagcatctgccaatcaatcattgaaattaacagctaaatttcttacccctcttgcaagaactgttgttgaagtccacatatgaacattcaaagtatattattatttac

SEQ ID NO: 301376 - DNA, 427 bp, Glycine max
  unsure (1)..(427): unsure at all n locations
cttcgattcattctatgcacccatcatggtccacattgtgtttcgtgcatttttattctcgttttgtttactttttataccccctgttgacgtgcttaagccattttacttaagtcatttctcgcttaacttaaaaataaaataaatttccaccgaatgtttgaattgtattatccgtcccttccgctaaacgaattccgaccgctcggtcgtgccgtaaccacgttggaaatcaaaaagagataaaaaaataatataaataacaaaaaacatcttttactaaaataaagcggaaaatcaattggacgttntctctttgggatttctcattcttaatcgaattgattaataactaaagtgaaactaaggctaaaatcaactcgcctagtcaagctcgtccataaaaatangctttcgaagttcatca

SEQ ID NO: 301377 - DNA, 462 bp, Glycine max
  unsure (1)..(462): unsure at all n locations
tggagaggatgcttcaatggagganaagacagagggagagaaagagagagaggggagcacgaaattgaaggaagataaagggagagaagttgaacattgagttgtgtctcacaagactctcattcatcaaagttacaacaagtgttacacatgcttctatttatagactaggtagcttccttgagacgctttcttgaaaaacttccttgagaagcttctttgagaaaacttccttgggaagctagagcttagctacacgcacccctctcataactaagctcacctccttgagaagcttccttgagaagattcctaaagaagctagagcttagctacacacacatttctaatagctaagctcacctccttgagatgagaagttagagcttagctacacatccgctataatagctaagctcacccccacgacaagatacatganaaaacaaaaaagtccctact

SEQ ID NO: 301378 - DNA, 466 bp, Glycine max
  unsure (1)..(466): unsure at all n locations
ctatagatactaagcttctncacgctntcctccatacctagaacttcaaaccttcgattctcactcgattcttcaccaaatcgcgtcccgtaaagcccaatcttcctctttttcattcctctttcacttccaccgatcaaaatccagaaaaacttcatcaaatggcagagccatcaaagaagagaaagggatcatcctccccgctaccgtgctgcccatcgccgtcacggcccatccggagcacccacagcacctattcctccttctttgtcatctccaagatcatcaacattgttttcatccgatgatcaacgtctacggtatctttctcagttttcttctagaataatcttagaccctaagtacctagacgtagagttctttaatgatgaaacgtttgattgctattgtcgcaacctacccttcggtgggagggcgacgcgagactcgcgggatgcgtgttcca

SEQ ID NO: 301379 - DNA, 445 bp, Glycine max
taattccacttttgattccttaattattctttttagtgcattccttaattagtataattttacactttcggtcttctaatcaactatatatatagacaatttgattctctttgtgacaatcccaaattattctcgtaaaaatattttattttaatatttaatcaattctattagggctattcactgcccattatacctgtaattaataattgattattataattgattgtcataattaaatgaaactgaattattaacaaaaaaaaataaaatataaaaatattatataattgattcttttaatatataaaaatattatataattgattgtttatatcttaatattattttaagttaactatgttaaaacactaatatatatttgtaattatagcatgttgaagagtatgtatagctatatatctttaatagagtttaacaaata

SEQ ID NO: 301380 - DNA, 453 bp, Glycine max
  unsure (1)..(453): unsure at all n locations
ntgatttacacagagggtttcagggacaaagctntgatttacatattgaatttcatccaaatttttgacaagtcattgttacttccatcaatattgatattgtatcatgcttaattatatgcatttgcttattctgatcattgtgtgttgcgtgattatttcttccatgcaggtacatgattccccccccncgcggagtgaaatgatgggcagcagcaccaactaaggtgattgtatatttccttttttttgtctttatctttgttagcttgctatatattttttattttatatgtctgagctttaaatgtgtaaaaaatagaaatagaaaggtttgctatcattctttgaatgccatcatctacctttaatgactcatatctaaattggtccctgtttaactaaattaattacttattgccttagcttgactggatagaagtatgatatgtc

SEQ ID NO: 301381 - DNA, 449 bp, Glycine max
  unsure (1)..(449): unsure at all n locations
tctaagccatgtccaaagtaagaaagatgcatcatccatgactntattgccgctgaaagcttcattagagaatattattttgttcttgtggtgccatatggaccatgtcaaagctagccaccaacacctccacctcttgacccgtattccatcagccaaaccattcatatgttgtangaagtgcgctccgggtttgcggaaaagcacccacaagtttcgcccaagacaaaacttgccaccacatataatttttctacagtggaaaaataaatgccctgcgtcttcctcctcaaggttgcagaaagggcatcgcccatcatttatcacaatttggcgtgattgtaggtttcttcttgttggcaatctatccctgagtagtagtctccatgcaaaaactgtanatttgcttggcacctttaatttccacagttcaacagaagctacatcca

SEQ ID NO: 301382 - DNA, 435 bp, Glycine max
tgatttgtgagttgactttagccttagtttcactttggttattagtcaattgatccaaggaaacttccaaagaaaaacgtccgattgattttttttattattttattcaaagatattttaattattttattattatttttcaagatattttgattattttattattattttgctttttttttccctcaccgcagtacagcgtgaacgattggttagattttgttttaacagtgattaaacgagaatacaacacacatgatcggttgaaattcattttatcatttattatgcgagacaacggcttatacgatcggttaaagcttgttaataacggaagataagacaaccgaacatgaacgaaatgaagatgacagctaacacaataagaaatgaattgaaagtctcggattcaaaaacttacccgttgaagaacga

SEQ ID NO: 301383 - DNA, 451 bp, Glycine max
tctctgcatgatgaattgccaaaatggatggatccatgcttattgatttcttttctgtgtatgtgacagggggggaaaaggagtgatgggcgaacacctgacggaatacgtccaattaactcgagatgtggcctattacctatagcacatggaagtactctttttacaagaggcgagacacacgctctgacccactttatttgttttccagtttatgcttttgatgatatctgttggtgtctatatatgcttatgcaagtcacattatctcttttctgtgtttgttagttctattagaagggagatagaatgatcaaacacaaaggaggaacaaaactaataatgctgactccttggacctttaacacacttctcatttaaagtctccaattgtaatcaacttggatataatctagaaactagtgattggaagtcagtattctgattactc

SEQ ID NO: 301384 - DNA, 205 bp, Glycine max
tgagatgaccgagctgcgatggagcgcagctggacatagcctgtatcttaatctagcttgatccaatcttcatcttattccaagctgctatccatggacttctatggatgcgagcttcttctagacccagcaattcctcgaagtggagactccgctgtctaaaacttatccataccttcgactctgcctctccctaatgaaaacg

SEQ ID NO: 301385 - DNA, 430 bp, Glycine max
tttgtttgtggagtcgcctttgatctcaactgtaccatatggaataacattagtaacaacaaaaggaccaatccacttagacctcaacttaccactcatgagtccaagcctagaattatacaataacattttttgcccaaccacgaagtcttttttaactatcatgctatcatggaacttctcgtctctccctgcagaacttggcattctcgtaggcttctatgcggatttcatctaactcactcagttgcaactttctttcctcaccagcttgatccatagagaagttgcaagtcttcactgcccagtaagctttgcgctcaatttccactggaagatgacatgcctttccaaagacaacccgataaggagacattcctatgggtgctctataggcagtccgatgtgcccaaagagcatcatcaagcct

SEQ ID NO: 301386 - DNA, 448 bp, Glycine max
  unsure (1)..(448): unsure at all n locations
tattacataagagatccacgaaggagcccaaaggcgtgtttagcacgaatcccgcgctaagcgagctattgccgccatactcaataagcccagacgctgtcgtgctcagtgcatgatcacaccgtcatacctactaagctcagaagggtgcacttaacgcgaggtcgcataaattttaactctcctcggctataaaaggaataggaagcanaggagaaaaatgcaatgagactcatagctctctattgaatacactcaaagcctgaacatctctaataggggaaaccctccttcttctatagtcattttctacttttcttactttatccatccttattcttttctgggattcattattattaatcgcggcttgactacccatgctaatgtattacttaggaaggaatgcatttaaaaatgggtattttctagagaactagaaaatgac

SEQ ID NO: 301387 - DNA, 450 bp, Glycine max
tcatatggagccatgccaatggtagaatgaacactattgttatatgtgaactctatcaacaggagagaacactcccaactccctttttgttctaatacatatgctcttaaaaggtcctccgacgactgaatggtccgttcagttcggccatcagtctaagggtggtaggctgaacttactctaagcttggtcccaacgctttgttcaaactcttccaaaacctagaggtgaatatagaatctctatcagacactatgctagatggcacaccatgtaatctgacagtctcactaatgtacagggagcgtaacttctctaaggaaaacctaatattgatggggataaagtgtgtagatttggtcaatctgtcaacaacaacccaaatagaatcaaaacctctgggggtcctaggtagtcctacaacaaaatccatggagatactatcccacc

SEQ ID NO: 301388 - DNA, 440 bp, Glycine max
  unsure (1)..(440): unsure at all n locations
cgtagcaacaaaatgcanaacatttctaaatcaagctggtttaaaaggtgaattntgcagccatgggaaggaagattaaagataagcattctgaatcatattggctcaatcatcaaacagagtgcaagaggactctttttagtattattaagtatcatcccctattgtgtcatttctttccagacttgctacaacaggggtggtgatgaaagaaatgttacaggttagtgcattttcctcatctctgtacaagttctcctctttgccattctactaatcattaattgatgtagtagcacctagaatgaattttgtgctctaggttaattgttaagagaagaattttttatatctaactaatttatatatggaaattgtttgagcaaaatgaaattctctgaagctttgatcaaaacattagcaaataacaacggaattct

SEQ ID NO: 301389 - DNA, 454 bp, Glycine max
  unsure (1)..(454): unsure at all n locations
nntgattttaaatcttggggctacgagaagggagattggatgaaagactntgttctctagacaagtctttatgatttgagcctatgataaatctacttgttggattttcatgaaatttatattattttactctatacaaaatttgaaacaatttcatgttgaagcccttgagagatgaggtcatctgacgcccattgtgacatgcaaggcgactaccttgttttgcaagttgtgtctagtaatgtgttgttttctttaattcttggcttatgtagttgtcaacttgaaaaattggttacattttattaaactagaaagaaaattattttcaaccatatatattagaaaaattatggatttcagcttcatgttctaaaggcaaaagcaaaacanagtggctgcaagaaagacattctgtgaagtatagaaaaagtgttggaaagaaaatcttact

SEQ ID NO: 301390 - DNA, 448 bp, Glycine max
tgcagaagctcttagaagctgtcctgtgatctgtcaccatagcctatgctgtagcctccattatgaactatattttgtactatctgtcaattctcgtatgtatatacacacacacacacacatctcagcaaacaaaggctgaggatcctttttgtgtgcatattttcatactcaaacatttcaacattatgaacatatttttaaattatatagtttggtcttaatactatcaataaatattattataaggtcaacataataattattataggacaaataataatgacgtcgcgaaatccatgtagcagacctcatctagtggaataaagcgtttgttgctaattacttgagtgtttggcactagactatgactttggtcattgattctgaatatacttataattttgataccttgtaattattagcatgtatatatgcgtagtataaa

SEQ ID NO: 301391 - DNA, 461 bp, Glycine max
tcataaatccatcacttttaatattctttgtacacaaacttatttgatgttaatttaaaaattatttgctcaaaaaggaaaaattaaaagagaaaaattacaaattcctatataatttaaccccaaaatattctcataattagtagttatcactcacatatcaacacatgttcaaatttacacttacctcaatctcataacaatgctataatctcatgattcatcgtatattcaatttatcacttacacacaattttaattacaatttcatgatctcaatataacaatttattacgctaatatagtaattttgtccaaaatacaaacaaattatacgaaaatgtttctcacaacatcaggaataaaccccctcaaacaatttcacataatcatatatgaagaacacaatacaatatatatgccacaataaaccccaatttgatcccctaaggatctctaca

SEQ ID NO: 301392 - DNA, 353 bp, Glycine max
tctaatgagtgcctagcgtcagtcatgaaatcaagtcgcggcaccgaaagaatcaacaattgtcctacaggtggtggggctcgcgaaagtgtgtccgtgaccacgttggttacaccggccttgtactggatgtgatactcataccccaataatttggagaggtagtaatgttgcttcgggtctggatacctgcatcatcaactcccagaggctcttgtggtcggttagaatggtgaatgacctacccaagagatattgcctccactttcttacagtcgcaacgatagcatgtagttctcgaatatacgtagaggcatagaggagctgatggccaagcctttactgaagtaagc

SEQ ID NO: 301393 - DNA, 454 bp, Glycine max
  unsure (1)..(454): unsure at all n locations
tctagccaaatggacttaccttgacttaattcctttgatagtccttttgagccttgtttccctttccttgttttgaagctcactacaagccttaagtgaaaaaccatgatatcaccatatccttaaggaattttggagctttggaattgttttgggaataagtgtgtgggtttttgtttcacgcataacatgtttgttggccatgcttcatgatatattttgagccatacttgatatacattgcatattggttaaatgttggacatgctgaatatgatgttgtttctcataaggctacagagcaaaaaaaatatatatattataaaaaaaatcgaataagacaaacagtaaagttgagtgaataagacaagaatgatgagactcttggttctactctntatgtttaaattttatctctacttctttgtatcttcttatgttttcttaatatgca

SEQ ID NO: 301394 - DNA, 429 bp, Glycine max
  unsure (1)..(429): unsure at all n locations
tgagatgaggaagtgttgaagggtgaaacttcctgcttttattgttgaccacagagtggtacctggagatatgtcgcggnggtcaggagaccttgnggacgtcaggtggggtgctattgcccaaaaccaagcttgaccaatcccgacccaagccgggcatagtcggtcagtgagaacctgtctgtacctaacaggcgagctcctggcagtcaacagataaaaggaaaacaagaccacaaagcaaggaggcttgtggtggctggccagctgtgaattttgtgtaatatgtggattgtggcctctggtaatcgattaccaagggtgggtaatcgattacaaggcttaaaattgaggacaggaggctaagatggtctctggtaatcgattaccaaggggtgtaatcgattaccaggcttgaaaatgaagtca

SEQ ID NO: 301395 - DNA, 447 bp, Glycine max
  unsure (1)..(447): unsure at all n locations
taggtgtncatttgaaaatattntcgtcacgctctaatgtacgtgttcatactggcagtggcatgcacacctccacatagtaattgaagccgaaacataaggcataggcaacaaattgagatccacagattagactatcaccataagagagtaagagatgaaagttcaattaatgtgatttgcttttggtggacagtgaaatgtgactgtagatttggtttgtgcacgctacggatgttcacctttttaagctctggtgcagccgcagtaaactgttctaaatgtggctactgcctcttggcctactcaaaaaataaaattaagtcttaatctaaccatagtaactaactgtcaccttttataggtatagatgaatccacaagtcttaaccttaattcaaacacanccgtagtaaatgattcacatttgtaaggattaaattataaa

SEQ ID NO: 301396 - DNA, 439 bp, Glycine max
  unsure (1)..(439): unsure at all n locations
ctannaattgaattaaaacgttcagaaagtgctggtaatctattaccatatatgtgtaattgattacacagtgcaaattttgaattcaaattttaatagctgttgtaaatcatctttggccactggtaatcgattacatcctctggtaatcgattaccagaaagtaaatctcttgaataaagccttctcacttaatttcttggccaaaccttttgctacttcaaataggaattcccttcctatttaatatacccttcctaagactctagaaactgtcttgatcatccatcttgaatatctttaatttctttgtcttgaataaatctttgagaaacaagtgatcatccatcggcataatcaaaacattcagcttgatcctttgtctacacaaaccacaagacaatggaggatatacatggagaataagatgaagaacaag

SEQ ID NO: 301397 - DNA, 239 bp, Glycine max
  unsure (1)..(239): unsure at all n locations
tatagccattntattccacgctnttagagccttgcacatcattttattacacccctatccattttagtttgatcactaacaaacttagtgactctgcggaatgcaaagatacacatgttctcctttgattccacgatgctgggacatcaacgggtagaacttattaatcctgagggtctccccagacctcaagaggatactctttaggaagatggaaaccacaggtgtttattatgctt

SEQ ID NO: 301398 - DNA, 440 bp, Glycine max
  unsure (1)..(440): unsure at all n locations
tggganagtcctcttgatactatttatacatttttgactctatggcatgagatgaagtgcaaagattggacctcttgctagttgttactaatgaatagcttaaacccttgtgcttgagtgaaacagtagccgtgagactgtggtttaagctactttccttaatatttgtcttatgattccttcatctatgatacagcttacattttattcttctctttgaaagctgcatattttgtgaaagacaagtgatgagtacataatgcttcatttttttatcatgcaatcagtaatttttgctgcatacacctttgttgatgatcactgcatgttattgtcacttgaggacaactaagttgttctctttttgcttgaggacaagcacaattgtaaatttggcggagttgttagtcgatgaatacgactaacctttatgtataaaa

SEQ ID NO: 301399 - DNA, 442 bp, Glycine max
  unsure (1)..(442): unsure at all n locations
ntgagctcagacattagagttacgttacctcgaagattccggtgagacagatccaagccctccaccattgagttgttaccacagctgacaccttgccaattgcagtaatctgagttgttgccatcaccccatccagggactctcagctcttggttgatggcatgtaatatatcttggtcccacgctcagaccaacaagttcagaacttgaaagacaccaagctaccagtatatacaacaacaagcatagaaattccatcactgtacagtgtacactgttgttctcttctcttctctgctgaagcgaagtgttagtgtttacactccactcaacagtgttcttctccaagagccaaaaaattggtatcaacactctaccacagcattaacaacttttgctgcttgttcttttcaccaaaaaaaagtgcaaactttctttcaca

SEQ ID NO: 301400 - DNA, 474 bp, Glycine max
  unsure (1)..(474): unsure at all n locations
gcggcgcgcgcgcgntttganngcctcgactcactctgggcgaattcagctcgtacccgcgatccctagagtcacctgcggcatgcagctttatatttttatgctcatggttggtattcatactattncacaaaaactttttgatataaataaaaatatcttcacaaaaaactttattaaaacaaaaaaattagaacttccataacataatcacatgtaaaatggttataggtaaatattaaatagccttaaaaatattcttgtatcttattttggggttgagaaaataaatatgattatttaaagctcgatcaagggtaacttttaatcaaaattattttattaaaattaactcgatagtatcgacacatataatacaaaatctttagagtcaatgactccataatactaaataacaaagagcttttttaatcatctatatattattatgttctaagtctatttttttcactt

SEQ ID NO: 301401 - DNA, 415 bp, Glycine max
  unsure (1)..(415): unsure at all n locations
cacggcgccgcggtgncttgatcctcgaggcatcgagctggcccgggatcccttgagctactagagctgcagcttgaccgtttgactgaagtgcgacctaactggagtgacgactgcttgaccatactattgatgaatattgaatttaaatgaatgataattaggactgagaagcatgatgtcataccaactttgaccataactactgatgaactggtttttgctccatgataaactatgattgcataactgaccctgactttacatgactatctctaatactttgttaaatctatgagagcatatggctcacgaccatttactctaacttggggagaaagtgaaggatgaaagaaacggtaagatcagaccacacaatagtgttgtaaaaacgagcgagatgacagatattgcn

SEQ ID NO: 301402 - DNA, 414 bp, Glycine max
  unsure (1)..(414): unsure at all n locations
agcttgagaaattacctttntgggttcaaaaacaagctaatgtgagaacactcctatatgaaacaagacaaggttgagttgatgggaccttgtacgcatgttgtgacatgtgtggattggatactttgcggaagggcataatggaagattggaggtttttttattattatttgggaaattggaggttatgtcaatgattcttttaatttactaacatagcaagcttttttattattattttcatgcattgacaatataaattgtgttaatctgcaattaaagataatcttaattattttcatggatggaaaaacttggaatttgctctcattgttttttataaatgatatggttcttttaagtaaattatttgaattataaaatanaaaattgtattctcaatttataaacaag

SEQ ID NO: 301403 - DNA, 369 bp, Glycine max
agcttggagctttttaactttgcaggcggtcaccagacatttgaacttgccatcgaagatcgctatggaatgaatcctgagattacttcactcgatgccgcgccgctctgatgtacaccaccacacctagaaatgacataagattaccgggagcacaacctcagctccggaatagatgtttatccgcctgacattgtcttctaaagtcttcacatctgaccgtaactgctatccacctgtgacatgttgctccagatacaggggatgatattgaaatagcaaacggatgcgtggaatccattgcaatgaatgcttgtctagagcaactatgttttgccttacctaaattagactgtgatggccaatctg

SEQ ID NO: 301404 - DNA, 415 bp, Glycine max
  unsure (1)..(415): unsure at all n locations
agcttgagatgttgtagtgttgaagggtgaaacttcctgcttttattgttgaccacagagtggtacctggagatatgtcgcggtggtcaggagaccttggggacgtcaggtggggtgctattgcccaaaaccaagcttgaccaatcccgacccaacccgggcatagtcggtcagtgagaacctgtgatgtacctaagcaggcgagctcctggcagtcaacagataaaaggaaaacaagaccacaaagcaaggaggcttgtggtggctggccagctgtgaaaattgattgatatgtgagatatggtctctggtaatcgattaccaagggtgggtaatcgattacaaggcttanaaatgaagacagggagctaagatggtctctggtaatcgattaccaggggatgtaatcgattac

SEQ ID NO: 301405 - DNA, 248 bp, Glycine max
cttggcttggttcaacgatcaaatggatgccccacattatttccatgacacaaatgcaaaaaatgatgatttggaaattttatgccaaactggtcatgcatgcgcctatgcggacgcctaagtgtcaaataattatggccatgtttctggctttgattaatgccgggccaaaaagttgtagcgcacgggattttggttggtaatcaaaaggagaacacattttatgtcgcggtttcctttccttcttt

SEQ ID NO: 301406 - DNA, 405 bp, Glycine max
  unsure (1)..(405): unsure at all n locations
agtttaagactntggagttcatttgcggcatctgaaccatgccacctgcacacgcgtgccatagctgcggatccaataccttttcaccttccttcatggaaacaacaaaaaaaacagagtgtgttcaaaagagaaaataatgtgctttttgaagtttctgttttcttcaaaggagattcatcgcgcanagtacaagcacgagctggtttttgctttttgttcttttagatctctgtgagtgaaagaaagggaactaaaactacttctgtgttgttgttacccttcggagactattatgagcgaaacaaacgaccaaaccgacctcttggccagcaaaagttatgtttattaaattgctctgttgaaataaataagaatagaatgcgaaatgaaatttatttttgg

SEQ ID NO: 301407 - DNA, 375 bp, Glycine max
agctttgtttattgctaacgctactaaaagtagcttttggatccaaaagaacgtgagtcatgatatatcattatttttcttccgtctatacccttctctctgggtagagccacacaagtggtggtgtttcgtggtgtgccgctgcatacagaagaggaactgatattcatgatacagcaccgcccaatgtcaacaatgtacaaaaatttggaaaatgacatgttgccgcccatacattgcatgcaccgtcaatgtgctttcttaaccattaggaagttatacttataccatatgaccaaaacaatctacctctgataaaaatctgccttctcaaccatttgacaatctttagtatccgtatcggatgttattata

SEQ ID NO: 301408 - DNA, 406 bp, Glycine max
  unsure (1)..(406): unsure at all n locations
agcttgcgatcacgcaagattgaattgtagagaagctttaagtgttcgagatcgtgaagagaatctggtaaacagcgaattgtttcgaagagtgaagctcttgtttcgagtgcttggatgcaagtggggtccaatgcgagggtgcggctgcaatcggcaattgactcggcgattcgccctgcggaacggtgcgcggaggcgcggtgcatgtancattcggcgaggaagctctgcggcgcgctgcgccggccgtcgacgattttcgagaagtggcggatggcctcggagtaaagcccggcgtcgagggcggcgagtgcggcggcgcggcggcggaggaggaacttaatgtggccgangagttgggccacgctctcggagtccgcgagaagggttcgcggcggagttg

SEQ ID NO: 301409 - DNA, 404 bp, Glycine max
  unsure (1)..(404): unsure at all n locations
tgtcttcaataccaatcaccttataattatgatccacagctttaccagattggcatcccccatggtaatgataaattgttagcacaatgtctatgcaatactgttctaaagagaaggaaatattagcatgtttaggcctcaagttaactggtaaattcaacatcaagtctattagatcttggaccgacatgttgtggtancaaaactttgagaatgcttttgagtttatcatatctatgacgattatcatgccttcaacacatttctttaagtcttctggatccttacaatagttgaaggtaactgatggctatcattcggatccacttgaggatatacttatttgtgtataaactttcctaattatattaagaggtctcacaaatatgaaacaaagaacaatc

SEQ ID NO: 301410 - DNA, 272 bp, Glycine max
agcttcttccattcttatatatattgaaacgggggacccgaccagccagatgtgatacatacaatgataatagtgggaggcaaaatgatggtgaacctagggtggaagttcaaatcgatataacaattatgtccaatgcttatgaaattggccgatgaaggatctgactatttggaaacctggtctttaatttattcaaggggtgtaaagcttagcagaaagtggctgaaatttgattgaaccaaccacatgggtcttatgatttcacgtgt

SEQ ID NO: 301411 - DNA, 409 bp, Glycine max
  unsure (1)..(409): unsure at all n locations
aggcggggnccctgtaatgatcnctganaactccactggccngggatctgtaagtcactgacgcatgcagctttgcagtttgatctttatcctatctcgacggccatggtgaatccgttcagtaatccgaagaaaaacgggctacaatgataaaaatgaaaaggagattgattggtctgggtgcaaacattggaaagttgcatgacttacgggctaaccaggtaccaaaagacattttccctgccattattgacgatgcttgacgctgcaggaaatctcactattgttcgtgatggtttttggtatatgaaatatatgctctgagataggaaatacaatcattgcctcggcctttgcttagagatctttcgctgtaatgcctgccttcaccgcatgatattttagggtt

SEQ ID NO: 301412 - DNA, 377 bp, Glycine max
agctttttggattcgtaaagtcatacaattatacgatctatggccgtaggttaacaacctctggatgatccaagtaaaatactcctactacagaccttatgagccactgcaacgaagcacacacaggaagacatcttacagatctacccatatcagtagatcacatgatgctacatctgatagagaccatatacatcattgatgggatacaatcttactcaatgccattatggacgttaatgttcctaccatgagtagtcaacacatatgcaaaccataaattcaataataatgatcatcatcttaaactctatacactattctaagcagtaataatagatatattaaaatgatatattagtcccgatgatccttgc

SEQ ID NO: 301413 - DNA, 409 bp, Glycine max
  unsure (1)..(409): unsure at all n locations
agcttgcagagtttatcgagtctttatgagaacaaagcaattataaacaaagaagattgttgcgtaagtactacggtcaccaaaggcaaccacgagaaatagtttctagaagatcagtcctcaaaagcagcacttacagctagaactaaaagatatcatgaagaaacaactaacaacaacaagcacaccaactgtcacaattttaaaatatattgtttaaagaaatgattttttattttattgattctttaagataattttaaaataaacaaatttttaaaaaataagtcatagaatttatatatatatatatatataaagaagagaaactattctagaactttatgataaattaagaactatacatacaaaaaatatgttgaactgattntgatccatataatatcaa

SEQ ID NO: 301414 - DNA, 415 bp, Glycine max
agcttcttatctcttgctcatcttggtggcgaagctccttcttccttggcttattcccttgtggatggtgcctcctctctcctcttctcctttgccttctgctacatctccatggtcgaaaatcaccattgaaggacctcattgaagctcaaagatccagcctccatagaagccccacaagcaagcttccatcaaagtctatgatctttattcttcaatacttgtgttgattattttgatataattgaatatatacatgactattttttttaaaaaaaaggattatgcatgattttgaatgtgatatgtgaattacttgcttaaggttctttcataaagtgttttcaaaaatttaacgttatatatattcttttgaacagtattttgattctcattcaaatccaattctccctta

SEQ ID NO: 301415 - DNA, 396 bp, Glycine max
caggtacgagagttgccctggattcacctaacgactactttccttagcacacttatgttcaatatgttcgatttggcattgagatctggcctgaatcttttcctttgaaaactattctatttggcaaatcttcccaaaacaccattgaaccactgatggaggctttggaggaagattatatagatggcaataagatgaacgaatcacgggcagctattgaacgagtatcggatcttgcacagagaatcaatagactagatacattgacttagagattacatataacacactcttggattgctgaacacagtattagcctataaaccagatctttaccactctgtagatatgcttaccttatttctgatacgagcataatacaatgactcgactgcg

SEQ ID NO: 301416 - DNA, 267 bp, Glycine max
tccacttaacccattcactagcctttcacttgactttgttttaacagcatacacttatttgaactcttcttcccccaccccccccttttttacttaaaacattgtattaatttgatgcgcgcggtgatgattcatacccttaaaattattcatcaaacaaactcccccaaagttggggtaaaattgccttaaaccaatgtgctctcctaaaaccaaagcgtggtcaatggagatgacaattgaaagcctaaggctcaatttgacaac

SEQ ID NO: 301417 - DNA, 407 bp, Glycine max
  unsure (1)..(407): unsure at all n locations
agcttctcaaggaggtgagcttagttcttagatgggtgtgtgtagctaagctctagcttctcaaggaaattttctcaaagaagcttctcaaggaagttttctcaagaaagcttctcaaggaagctacctagtctataaatagaagcatgtgtaacacttgttgtaactctgatgaatgagagtcttgtgagacataactcanagttcaacttctctccctttttttcttctttcaatttcgtgctcccccctctctctttctctccctctttcttttcctccattgaagcatcctctccaagcttcttatccatggctcatcttggtggttaagctccttcttccatggcttattccctagtggatggcgcctcctctcacctcttctcctttgtcttccgcttcat

SEQ ID NO: 301418 - DNA, 366 bp, Glycine max
  unsure (1)..(366): unsure at all n locations
cangggcgtgaagggccttcatacatggtgctgggtgcaccagaagacatgctatgtgaacctatcagcattataatgcggcgtaaatgcgaggccgtagatcgcgaaagtacgaccatagccatgcgcataaactcatacgtcatgggataaacgaaacactgatggctcaatggagagtgactcacaatgaatgagagcaaaatcacaggttgattttgacaggcggataccgcaacattccatatgataacatgagcagcaaaattgatatactatagaaaccattatgatatgaggacatgtaagaagatacatgccttgcgcttctgcatgaaacaatgagttagactaagctattttccg

SEQ ID NO: 301419 - DNA, 409 bp, Glycine max
  unsure (1)..(409): unsure at all n locations
agcttatagaggaagcttcaatggaggaagagaatgagagagagaagcgtgggaattgaaggagattagggagagaagttgaactttgaagtaagtctcaaaagtttttcattcaccaaagttatgacaagtgttacacatgtttttatttatagcctagcatatgggaaacttccttgagaagcaaggaaggtagcttccttgggaagctagaggaagaaagcttccttgagaagctagagaggggctatccacacccctccaatagctaagctcaccccatgccaaaatacataaaaatacaatgggaagcttctttgagaagcaaggaaggtaacttccttgggaaacaaggaagacnagcttcttgagaagctagagggggctactcacacncctccaatagcta

SEQ ID NO: 301420 - DNA, 400 bp, Glycine max
ttctttggaacaacatatcgcagccgcaaatgaagatactggcacgatcctgccacataactgcatgctatgatcgatcaaatgacttggacttatcagcatcctgtcgttttgacatccatgcctaccaacgacatgaacttatacctgacattcttttactgcagagaacgtttgtgccatggaagacgggtaatatatccatcgccaaaactatcgctaacaccagagactatcctacagatccttgagcaagcctcttaaaaagcctttaacaggatggtctgatataggcgcatgtggaactgtacagtggacatggcgtagaaaccggtctgatgatacctgctcgagcacatataagcttttcgagaagctgatgctaataagaacaggcttc

SEQ ID NO: 301421 - DNA, 401 bp, Glycine max
  unsure (1)..(401): unsure at all n locations
gccgccttatgccttcttcttatccaagacactccttggggtgaaggttatccttccatggcttattctgtacaggatggctcctcctcctacctcttctnctttatcttgcgctgcaactgcatggctgaaaatcaccattgaaagaccttatcaaagctcaaagatccagtctccatagaagtttcgcaagccagcttccatcaagcgataattacttctttgtttgaacaagaaaacaagcgtaatgactttgtttggctaaataattatgctatatcatctgacaacttccccgtgaaagaactgttaatgtggaacatacactctaatgaatagcatgacttatatgactaaagatatcacacccttgacatttaatgcatgattagactacgaat

SEQ ID NO: 301422 - DNA, 386 bp, Glycine max
  unsure (1)..(386): unsure at all n locations
agcctgtggagttatatgaaatgcttttcatttgaatcacttatgaatacagatatcttagtctctaaaaaggtgtcaaaggattggtaagaagctatggagaatcttagcctctaaaaagttaatttcttccctcaaagaattggtaagcttttcatttgaatcacttatgaatgccgatgaggaaaaccttacttttcaattttatttaattgcgctcaattctatttaattacacttaattaacttctgtttatagcctttaccattttgtaaaggtttaatcctctaatgagcttgtttatattactggaatgaatctattctgtacttntcaagtactctctcctatgtaaaanacaaaaacttaagtctttgtgttcaat

SEQ ID NO: 301423 - DNA, 337 bp, Glycine max
gcagctttatactctacttatgcatgaaaagtatcacgtaattcttcatatagacgactaacataattcccaacttttgcactttatctcattccatacacttatgaacacaaaaaggggatctggaggactttatttggcttgtaatgagggtgggctgagaacaattcatttgttttctacgatgcaaaacttaagttctacgagagcattcatccattaatcaccttctctttaactttccagcttttattgacatgccacaattaacaacacacagagttttcttcattcttgatgttctttcactctcctttctttttatattttttcttat

SEQ ID NO: 301424 - DNA, 357 bp, Glycine max
agcttctattctgtgtgtgacatctatgctattgatggtgtagttcagccacgcgacatctttggtaatatataatgccctcgttatatcataatatcctcacaatcctgaattataagatggtttgagagaatgaatgtattactttatataagcttaatgatcaagtcttagatgtagtaattattgatatctctccatatccttgcttaattattctctcttcaaatatttatgacatatagttatgttattgatgaaataagagaaataaaatacagaattttaaaatgagagtataaagacgtgatagattgaatataattaaggaaaccaattatttttcgtaagagatat

SEQ ID NO: 301425 - DNA, 415 bp, Glycine max
  unsure (1)..(415): unsure at all n locations
agcttgtattattacaccatagctctgcacaaaatgactctaggatgtatatacttgtactgatttatttgctataatatataatacatacatattttgcctatcaaaaaaaaatccttgactttctcaggcaagtcttaaaagaaagtatcacacgggctaccttgttttaagaaatacctcaataagaaaaaccacactaagtcttaccttggcaacagcataaacaccaaaaagacccgtgtccttgtaattggtgttgaaagccataatgctctcagcaacttcattaatgccaattcgctgtgctaactccgaactgtttatagtcaaaatgcattcagttagtatcagggagagaacttttcctttntcaggaaggggcgttcaagtcacataccccatgtgttttcca

SEQ ID NO: 301426 - DNA, 411 bp, Glycine max
  unsure (1)..(411): unsure at all n locations
agcttgtgaaatgtctctcaatcaagttcttatgaaaataaagaaatcggaatggcgtgataaaaatattgagattctgttgaaagtatggatagaagaggtgaatgctggaaataaacctcacaaccactttactaagcttggttgggcaaatattacagaaaagttcaataagataacaaatttgacatatgagtataaacaattcanaaataggtgagattctttaaaaaaaaggaatgacaattatgggctaattaagcttattgngaaggacactagtcttggctgagacggagacaagaaaaccattgctcctagtgatgaatggtgggaagccaaaattcaagtgtgtactattcaactaaaataaagttagttctagttgcatgtcattgaactctcttcagt

SEQ ID NO: 301427 - DNA, 381 bp, Glycine max
  unsure (1)..(381): unsure at all n locations
agctttctagcctaaacaatggttcgtgagttgaggctaagaagttccaatttctggaattttcaatgaactcgctaagcgagcccggcccactaagcgagttcatccattnttgttgatcttttgggttttttgatgaacacactaagcatgccctatcctactaagcgagtgtatcatatttttttttaatttttttgcaattttgtatgaacttgctaagccactgcactacggcttagcaagcctttgaatgtctgtatttaatttctacgttcgcatgaactcgctaagccgaccatctgcgcttagcgagtatacttagctgagtctgatactcagaggctttttgcattcttggtgcggctaagcgagccatgc

SEQ ID NO: 301428 - DNA, 405 bp, Glycine max
  unsure (1)..(405): unsure at all n locations
agctttttaanggataaaaataaaaacaaaatattttggtatggactaaatgaaaaaagaattataggaacaaaatgaataaaacgctaaatcgcatgaaacatatatttaaatctaaaaataataatttttagcaacatttaataaaaaaattaattgtatacattaattacatgtaataaatttattattttatttataaattgcattaattaatattcaaatgctttaaattcaaatataatcgtatattcaattatacaatctatttatttttaattatcttttatgggatataattgatcattaaattaattagttcaattatacaatttcaaaaaatctaattatttctggttaaaatatttattggtaacataattaacatatatatcgggtataatt

SEQ ID NO: 301429 - DNA, 411 bp, Glycine max
  unsure (1)..(411): unsure at all n locations
agctttatatctanggtaaagcagaagaggatatacccttacgggaatcaataataggaaaaatcaaatcttagttctgaataataatgagaatgaagagaggaatttgatgatagagatgaaagaatgaatacaaacttgcaactgcgcataggaccaatgactagtggttgtgactccttgaagctgtgcgatgctcttttctgtccactccaacgtaacactttcaaaccctagattctattatatttatttgcttataaaagaaaaagacacttcttttaagatggttttcaaaaccgtcttataatggtagtttctaaggcagtttttgcaaaaccgtcttagaataattgtatttatttacaaaaatgtcaccgtgtttctttctagaatgattctctatcaacc

SEQ ID NO: 301430 - DNA, 411 bp, Glycine max
  unsure (1)..(411): unsure at all n locations
agcttttcggatntggtcttcgccagtgaaaggatcgatgtgggttcgaaaagaggcaatttgatcatcctactangacgactgagaaaactggggcaaatgaaaaggttgagaaagagggagaaacccatgctgtgactgccattcctatacgaccaagtttcccaccaaacccaacaatgtcattactcagtcaataacaaacctcctccttacccaccacccagttatccacaaaggtcatccctaaatcaaccacaaagcctgtctaccgcacttncaatgacgaagaccacctttagcacaaaccaaaaaaacaccaacaaaaaggaattntgcagcanaaagcctggtagggttcacccanattccgctgtcatatgctaaacttgatcccatatncactcaata

SEQ ID NO: 301431 - DNA, 393 bp, Glycine max
tatgcgaggtgctggaatccaagatcgggccatgctcattgttgtctaatacaaagcatgatgatgggaggcacaacaacaaatgttgtatatgagataagaagctacaattcgtcctttgtaatcacagctttcctaagcccaatgaacaaacaaacaacgaaatttaacaaatggagaaaaggtttaagaataacaatgtccaagcagatgaatggacttattggaaaataacatggtatggaagaatgaacatatactaggggaatgaggtccataccatcaacttcatatcacatgaacagaagagagggaccgtggaaatttcagcctcaaacgacaaagacaggaaatggatctaccatatttacatttcttaatggattggagata

SEQ ID NO: 301432 - DNA, 419 bp, Glycine max
  unsure (1)..(419): unsure at all n locations
gcttcatgcattcttgaccggatgcaagagacatcctcaagcttagttattcttgactccattgcatcgaagcgcatactcacttgacgattgagagtattgaagccttttacgacgtaggctttgaagactataccaccgctgcataatccttgactaaagagacgagtcttctacttcatgtacttcttcaccaacatttctagcacacttcttcacccaagagccatcatgcacatttatataagccatggatgctatgactgaagcgcctgtatagaatgatctcttgattggagactancgttcacactcacgacggatgctcgagcgctgaaggataatggtcacaagatgatgatggagcaacggagcattcgatgcgatatgcttatgcatgtgacatataccatggatgg

SEQ ID NO: 301433 - DNA, 370 bp, Glycine max
agctttgaatcgattacacacatactataatcgattaccagaagagattttcagaaaatattctcaattggcacatcttttcatttggttcttgaatggctatcaaaggcctatatatatgtgacttgagacacgaatttgctaagagtttttaagaacaaaaaggtcctatcctcttaaaaagcaaaatccgtttatcctcttacaaattccttggccaaaacacttgtgattcaataaggaattatttgagtgctcaaattgctcaatctatctctttcaagagagatttcttcttcttttcttctttattctgaacagggattaagagaccgagggtctcttgttgtgaaagaattctaaacacaaa

SEQ ID NO: 301434 - DNA, 420 bp, Glycine max
  unsure (1)..(420): unsure at all n locations
agcttgtgtcattatgctcctgcaagtttcaatctttctgttctggcctgccacccttttgaggttttattatgagttgatgtgttttttgcaagtgcggttagaataagaataagaattgggcttttgtgcaacagttagattttgattgatggaagctgagtttggggggaagaatcagtacttgtatggacctgtggtgtctggaatgaagaaagctgttgttgggaatgggaagaggagtttggaatgggatctgaatgattggagatgggatggtgatcttttcactgctcaaccactcaattcagtgccatcagattgtacgggttgccagttttttccacctcatcctgaaattcctgcaaaanatgctaatccatctacccaccaattgtcttcttctgtattcatcttacg

SEQ ID NO: 301435 - DNA, 408 bp, Glycine max
  unsure (1)..(408): unsure at all n locations
agctttntagctattcattggtgtattatgatctacttttggtgctctaaattgtgggaatgtgctcaaatatgtggggcaattctggtttgctttcttgcttggatgggttgaattgggggtttgtatgagatggccctaggcctataatgtattttgaagcaatggggcatgccacattgtccccgttctcttgctattgatgcctaaacgcgcgcccaccaagtgttcggtgaaatgcctcaatggcattagcgcgtgattcttgtaaggaaacaacctatgggacaatttggtttgcacatgttttatattttttgggacatgtattcagtttcgtaagggctagagtaattgtcccacacatatcctatgcctatgaaccaaagtttctatgcaagagaacac

SEQ ID NO: 301436 - DNA, 418 bp, Glycine max
  unsure (1)..(418): unsure at all n locations
agcttgtaggattatggggtacccatcacatgtggtactaggtggcggtcgggcgatggtgcacaacagttttccacatccacaaatcgcgcataaacccaccatcccctgctgcccacctccaactgagctcacgtacgcccacgtagcccatatcctcgtttctctcaacaccgggtccccatcaatcctcccaagctttccccaacatccaagtaattcaacattcaaacaacacaaactatcacagccaagaaaacagggcaaaggcagaaaactctgcccaaaacaccgaccaaaatcacagcttttctcacttaaagaccccagtaacaattccttcgttccggttcattaaccgttggatcgactcgaacattntactggaagtctctagtacataagcctacattctgac

SEQ ID NO: 301437 - DNA, 410 bp, Glycine max
  unsure (1)..(410): unsure at all n locations
agcttgttcttattgtttaagtatctgataagactaatgcagagatncagacaatcaaagatatggaaaaaggattctacaccaacaaccacccttgttcagaggcataaaatatgattattggaagcaacaaatgatatctcactttgaatccattcatattgacctatgggtgatggtggaaaatggaaagtgcattccatacgatgatcagttaaatgaaattcctacaagttggtggatggagaagcaaaaacttagattcttgctcgactccaaggctcacaatgtgatgctatgtgctctatcagaagaggagtacaccaacgtacatggcttataaagtgcacacaaatatatgacactctagttgttacgtatgaacgaacctcacaggtaaagaggagtaa

SEQ ID NO: 301438 - DNA, 339 bp, Glycine max
  unsure (1)..(339): unsure at all n locations
agcttgttaaaagcggaagcaaagaataccgaaagtaagcaaaataaaaatgaaagcatacaaaacaagaatggaccgctgaatgtgcatagaatgaattgaaagattcaaatttgaaaacttaccagctgaagaacaaagaacaacgaagaacaaaagaagaatggtgaagaacatccatggaatcgatcacgaaaatgtctcgaaagcgttacggaagcacctcggcttgaattgtctccttctttcttcttctcctcactaatttcaagtgaaagcttattgcacaacaatgttggactcttaaactcagccccctctccctatntatagtggaaa

SEQ ID NO: 301439 - DNA, 115 bp, Glycine max
agcttgtataatattctttattactttaatccaagaaagttagtgaaatactcctctggaagtagatttagatcacgcaacaagaatgaaggttcctggccacaaatctcttgct

SEQ ID NO: 301440 - DNA, 409 bp, Glycine max
agcttctagcatttgctctatcctagacgaaggcgcatctacagaagcagcaacaacaacaagaacagttgactaatgagaatgaaaggtgagattgagaagaagaagaagggagtaccaattccaatgtagtggccaatttgagcgtcgacccatttatcagcgtcgtcatctccacagtacaagttgcacaccttgaatgaatgggagtgagaataagaacggcgaaaggaataagcgaattaaatgggaaaaagctacaacgaactgcagcgtacgggtgagcgaagatgttgatgagagccattctggcgaaatcatagagggcgttgtgtgtagattgacttcctcaccgccaataatcctttctcttcttcacacttcaacctcaactatggattccacacac

SEQ ID NO: 301441 - DNA, 280 bp, Glycine max
gcacactacatgattgcacagacagaaaatgcgcctattctaatgatacggagatctacaattgcaacagtgctctagaacgtactggtaacgcctttcctacgatgtcatagcgacgcccaccattactatcacgcatgctgcacagaacgagaatgcgacctcgcattggatcacacggcgatatcatcagacgagaacatgcgccctagagccaaccatcggaccaatgcatcgatctttagcgaactttttctgacttatagaacccatataacca

SEQ ID NO: 301442 - DNA, 407 bp, Glycine max
  unsure (1)..(407): unsure at all n locations
agcctctctagaagctggcaagaccaaggatgtagcagtgtttcttctgaacgcagaaagagaagattctccctttntcaatgacaactcagccttggttcatgttattaatgcatgcatttcacttggatggctggatcaagcacacgatctccttgaagagatgcgtctagctggagttagaactggttcatctgtatactcctctcttttgaaagcatattgccgagcaaatagagctgcagatgtcacatcacttctgagagatgctaagatagctggcatccagcttgactcaagctcttatgaggcaatgattcaatccagggtgctccagcaagacacacagggagcactccaactatttaaagagaggaaagaggctacaattccaaaagtcactcaac

SEQ ID NO: 301443 - DNA, 467 bp, Glycine max
  unsure (1)..(467): unsure at all n locations
ccgacacaccccaccccaccaaacccacccaaacacatacacccaacanncccggcggcgcccgtganctttgaccctcagacacccggcacaccaccgccgcgagcccaagagaccgcagctgaacctgtaaaaaccccacacccaaccgggaaaaccgcgacacatgcccggaacagaccaaagcacccccagaagacagaccaggacccggcaccggcccgcccacgccccaccgcacacccctcccaccgcggcccccgccgacacccaccaccaacccactgcggccacaccaccgccaacgccaacccgcggaaataccccacaccccccgacctcccccccacgacaacccgggaggacccacaacgcccccagcaccacacccaccatcccacccaccacacacccccaacaccccgcaccgcaccccccaccccaccaccacccccgccccacacacg

SEQ ID NO: 301444 - DNA, 405 bp, Glycine max
agcttttaaaggagagcttgaaaagacaagagtggtgaaagagaagctgaagacggcagtcactatggtcaggaaagagtgtgatgagttaaaagatatcaacatgaccatggttgaagcgttagagtgggaaacaaaaagggcctgaaaggaagaatggagcaggaacaagttttgaagggctatgtggggcagcagtaatgagctcaagcttagaaaggtcgagagggacaaatcaaggatggaaaacatggtgttagaggataagttaaagtcttgtaagaggtcgaagataattttgatggagtagttgagaaaaatagaagagaatatgttgataatcattgatcaatataaggagaaggtaacctggctactagtcatgggcatatgctggaagatgaa

SEQ ID NO: 301445 - DNA, 409 bp, Glycine max
  unsure (1)..(409): unsure at all n locations
agtgatgaacatccaacagatgacgactactgctgctatatgtctaccacatcaattgcttgtgtgatctggcttcagaaccagagtgaccttgcagtaatgctgacccgtgctacagaccatatgctcacatgcacaatttgggaggatccatggatcatgatacgtagagaaactgttatgtatacttctggttagcatccagactcaaaagatttgtggatgctcctattaacctcaagctgcataagcactctctgcccaactgaaacttggtgttctcaatgaagcatgcgtctgaggatgacggtgactatgctgtcttgctcgtgacaaagcactcttaatatgagctgcctctgatacggacccgtggaacgcacttctctngtgtgacccagattacccg

SEQ ID NO: 301446 - DNA, 419 bp, Glycine max
  unsure (1)..(419): unsure at all n locations
agcttttatatttgtctaatttctctctatgtgggttaatgtgctcataggccaatacaaaacaaaaaaaaaacccatttaaaacaaactatgatccataaaatttacaattgtttcttgatgcataaaaatagtactcgcacagggtaaatgtaccatacactctagtaacaatgaactaaaaggttcatagctcttacaaaccataaaggttctctcacaattcataagagataaaagtgatcaaaagattattttcttacaaagttcacagccctatttatagcttcctaatatatatcagtatgaaaaggtacactacgattacagtaaaatctacctcgatcatggtaaanaaatagtgacgttgaagctcttgcgcattgtggatcgactgtggccctcatggtttaccacaa

SEQ ID NO: 301447 - DNA, 413 bp, Glycine max
agcttgtggtgcattatattacatctatacaaaggaattttttatggggcagcctccaagactccaccaagattccctgggtgaggtgggacatagtctgcctacctaagagtaaaggtgggttaaggatcaaagatttgattaaattcaatgaggctttgcttgctaaatgggggtgggagttggaaaataatcagaatcagttgtgggccagaattctattgtctagatatggtggttggagggatttgatttctgataggaactgcagtttagactctccttggtggaaagacctcaaggttatcttcaagcagcagcagagcaacacaatttgcaatcacctgaagtggaagctgcgatcgggagataaaattagttcttggaaggataagtggctacatcataatctg

SEQ ID NO: 301448 - DNA, 412 bp, Glycine max
  unsure (1)..(412): unsure at all n locations
agctttgagggtgcgtagcccaccattttttcatagtagagtatcgataatgtgtctaccatcacgatcatcgtctccctttccatcattgggggtaccacctgngccgccagatccctccaccttttgggcgtgttctttgaaagatccgtccccctttttgcaaatgttctgtagttgcatcctatccggaaccatatcaaaattgtactaatactgcctaacaaaggcaaccattangtccttccaagaatggactcgggaagattccaagttagtgtaccaggtaacagctaccccagtaagactttcttggaaggaatgtatcagcaattcctcatcttttgcgtattcccccatcttctgacaatacatctttagatggttcttgggacaagtagtccccttgtac

SEQ ID NO: 301449 - DNA, 414 bp, Glycine max
agctttgaggttgtaggggcagtaaatagaattttgaagcagtgatattggcttgaagggaatgagattggactgttggttatcattttaatgaacagatttcctattctgagtattctctttgccaagacaccagctggattttgtcttttcatctaacatgtagcaattccccaccctcttttcttcttccaggaaaaaaatgatcaattttttgtactaagaaaaatgtgcaaatcattaatgagtttcatgttgctaggtttcttttgtgattatttataggaggatttggctccttacaagtgcagagtgtaattgaagatgctctcgaaattgtgataaaacagatgcacatgtaaaatacattataaaattattaataattgtaactctcgattttcaaatcattga

SEQ ID NO: 301450 - DNA, 538 bp, Glycine max
  unsure (1)..(538): unsure at all n locations
aaccaccantacatcatctcgcgcatccccaccagaancacctaaccacaaanaaccgacgcgcccggtgancctagacatcgaanacaaacganaancnnacccggaaccggagcaaccctacagcagacacgcacgcttgcaagctttaagaaacacggccctaagggcccaaccgcccactgagggaaaccccatacctagagcccccaccctcaacggagcgggcgaccactaccggaaaacaccgccgccaaccgccacacacgccatccacccaaagaccccggaagcactcaaacaacgacccaatagaccccccatacagcccggaactgcaacaacacacaaccccacaaccacatgccacgaggaacacacacaacaacaccacctaacttacagcgccaccacaccatacacccgcccaagaaagacgaaacacgacggctcaaaccgaaaaccgcaccgacacgggacacaaacaagaccacacaacgccccagacgcacaacaccacgaccagcacccccccccc

SEQ ID NO: 301451 - DNA, 399 bp, Glycine max
agcttgtgaccatttgaataactcaagagcttgcattgttcaattttgagcgtctcgatatattatgcgccttaatcggacctccgagtgaaaagttatgaccatttgaataactcaagagcttccattgttcaatttcgagcgtctcgatatcttatgtgcctgaatctgacctccgtgtgaaaagttatgaccatttgaatttctcgagagcttccgttgttcaatttcgagcgtctcgatatcttatgcgcctgaatcggacctctgagtgaaaagttatgaccatttgaataactcaagagcttccattgttcaattacgagcgtctcaatatattatgtgcctgaatcggacctccgagtgtaaagctatgaccatttgaattgctcaagagct

SEQ ID NO: 301452 - DNA, 231 bp, Glycine max
tgagaaaacacgctctatattcatctcacactccaagtatgcctccggatgattatttcctttaaatgcaggaacgctgagcttaataccatcgatctgtgattgactaggaacaccatcatctccctcttgtgctcctgtcttctatactatgatatctattctccattcgacacatcgcttcatggagcgcatcatatggctgtcccattaacctctccatatgatgcc

SEQ ID NO: 301453 - DNA, 388 bp, Glycine max
  unsure (1)..(388): unsure at all n locations
agcttttggaagaatcaagaagtgccttatgaatcctcccgtgcttatgccaccagtacctggaaggcctctcatcttgtacatgacaatcttagacgagtcaatggggtgtatgctagggcaacatgacgaatctggaaagaaagagcgcgctgtttactacataagtaagaagttcacgacctgtgaaatgaactactccttgctcgaaagaacgtgttgtgctttagtatgggcatcccatcgcctaaggcagtacatgctgagccatactacctagttgatatccaagatggacccggttaagtacatctttgaaaagctagctctcacggtggcaagtcctgctatccgagtttgacatagtctangtcacccaaaaggcgat

SEQ ID NO: 301454 - DNA, 402 bp, Glycine max
agcttgtttctacactcggatgtcttggaaacactctgttttgaggcaaggcttgatcttgagttaatcttgaagcaaggctttgtttgttgaagcaaccttgtattaatcttgaagcaatgcttatcctttgaagcaaccttgtttgattcttctttggcatcatcaaaatcatgtattcatacattcagactttaaaatattttaaaaatcaacaaactgattagaagttttgatttacacaaactacactcatttcattaaaatggcggtgctgctaacctaataaaagaaaaaaaataaaggtgagattctaaactgtttttcttcttcgggaacactacttctagttgcaaccttgagatctttgattctgctacttgtttttaatattatttgaca

SEQ ID NO: 301455 - DNA, 417 bp, Glycine max
  unsure (1)..(417): unsure at all n locations
agctttgttaagaacttacaaaaaaatcaagaacaagcttgttcgcacatcgttcgcgtgtatgacatccactccacaaggtttgaagtagaggagaccttcaatcctattacgcaacgtggcggacaaaagtgggcagctaacttaaacggtcattattgtcaatgcagaaggtattctgcacttcactatccatgttcacatattattgcagtttgtggttacgtgagcctgaactactaccaatatatagatgttgtttatacaaatgagcacatcttanatgcttactccgcacaatggtggcctcttgggaatgaagcgactatctctccttctaatgacgcatggacacttatccctgacccaactacaattcgtacgaaaggtcggccaaaatcaacaaggataaggaat

SEQ ID NO: 301456 - DNA, 410 bp, Glycine max
agcttcggggttattttggttgaaggacaaggttggatggtgaagttgatgtgtgggtgacaatcatgaattgacaaagtccttagttggacatccatacgttggatgattgactaaggatgaaaaaataattattgttgatatgacaaagtcaatgatgaaaccaagaaacattctgctaatgttaaaggaacacaatgccaataattatacaacaatcaaacaaatatataatgtaagaagtgcataccgttctttcattagaggaagtgatattgaaatgcaacatctaatgaagcttcttgaatgagatcaatatatttattggcatagattaaaggatgaagatgttgtacgtgatatcttttggtgtcaccttgatgcagtgaagttatgcaatgcatgtaatt

SEQ ID NO: 301457 - DNA, 400 bp, Glycine max
  unsure (1)..(400): unsure at all n locations
agcttgtagaatggttagacatgatacatgtcagggtttggtttggttcaaggataaaagggatgccccacattatttccatgacacanatgcaaaaatgatgatttggaaactntatgcaaaactggtcatgcatgcacctatgcggacactcaagtgtcaaatctttatggtcatgtgatgctagggctcaagattcgtttcctctattttaatcaacccaatgttntcaaaatatgttcttttatcaatttgtgcattcatccgagtccatttcgggcgtccggngaaatttcacagcattcacccttcaggtgtagacacattctccaaaaattggttatgatcaatgaactctttcacagaacagttggaaatcgtttcttttcacaagcatgct

SEQ ID NO: 301458 - DNA, 413 bp, Glycine max
agcttctacttatgtggcagggcgggcttccttcactttcttgcctcaaccgcgagctttgaccaccgctctttcttcccacaatgcttctctttatatctgcctgagtgggtttatagcctaaaccatacttcccacgatttcctttggcatttatcaagctagttatgccgccgttgtctttgcctaaacccattccgggttcgtaaccgttccccaacataactcgggccatcattattgctgcatcggacaggcaaggctgcccagagaaggagtccacggaggaaatgctgaccacctcaaaagactggaaagcggattctaacgattcttctgcggcttctacataaggcatagaggatgggcagctcaccaagatgtcttcctcgcctgacacgatgaccaaatgc

SEQ ID NO: 301459 - DNA, 371 bp, Glycine max
tgaaggatgactcacgagcctagaattgtaatgacttaccgccgtaagcctacggaattaagacatagctcaatggctgattgtaaacgatatcgtggcgaccatgagctaccaccaacaggcaacaagtcatgcaccgttggggcttacaaaaggctgaagcctaggttgccaatgtgggctctgactacatcttgaactaaacctaactaaggcccttctagctgagtaacccatatcatatctttggacagccaaccttactcggattgggccattatttaaacgaactagacactctaaagttgaagcagagtggtgtcagtaagtactcctgcattcgggccatgatacaactcacaaccatggac

SEQ ID NO: 301460 - DNA, 234 bp, Glycine max
tagctttgagcaaatacaaacgacaatgacttttgacttggatgactgattgagtcccgtaatatatcgagacgctcgtaatggaaatcctaatccgtgagatgattgaccgacgatcactttttactcagatgtgtgatcgagcaccgtattatgtccagacgctccattctgcatacggaagctgtgagcaaagtcaaacaacaatcacttgtcactcagatgtctgattga

SEQ ID NO: 301461 - DNA, 408 bp, Glycine max
  unsure (1)..(408): unsure at all n locations
agcttgtatccatagnttccatgccctatttccttaccttgacaggggagattatcaccgtcaaggcagaccaaaagaaagcacaacagtgttatgcagaaagcctgaaggtaggaccatatcctcccaccagggagcttgccaagccttaccccacagtggctgaaggcactcaagtcatgagcatggacgaagggtctcaaatctgagccctgatcgtctaccaagcaagcctgggagatgaattcgacatagatccacgagacgatacctctaatagaggcctgaaacccatcgaagagcttgcaacttggacctaaacccgggcaataaatgcggctcaagaaggacctcactagtcatgagaaccgacacatcactaatgtgctacacagaaatgcggattta

SEQ ID NO: 301462 - DNA, 410 bp, Glycine max
  unsure (1)..(410): unsure at all n locations
agctttaacagtataatctgagctagctgaataaaaatctgacatgaagcagttattaaggtaatcattgcttcccatgcctgaaaagaatagacatttgtttaggtagctattaagtgattcattgtctcctctgaagaaccttctcaactgctgcactgtgttgtcaaagttagccacttgctcattcaatgatgtatgagccccctgcaaacaattacataagaaaatcagaggaggtgtggctcacgaattattgtgcctcacagaacgatatgtacatttaatatgtgcttaatttctcanaatactcatgaatatgaatttgcatacaaggttacttcctgtttcttctctaatgcctgctgctccagatgcatagctagctcctcttaatagtctcaaacccc

SEQ ID NO: 301463 - DNA, 402 bp, Glycine max
  unsure (1)..(402): unsure at all n locations
agcttttaattcgttgnggctgcaagcttctatagtccaacttgtgcctccaaaggctatcagtgtcaacagtgcaactacatgtagcagctgataatcataatccatgtctgctatacgctagcaaatggaggtggttcttatggagtgatctcttgcatctgaaaaagtacttaagattgttggcttggatttcatcattagaaatactccctctggtcctttctataagaaacaagttttagtatatttacactaaaacttgtttcttataaaaaagacaggagataatagctcataaggcacagataagaaaagcttgtattgctcagagatctaacttttttttttatcaccttttctcttaaaaaaattatgtgctgacagcatgtttgctctggg

SEQ ID NO: 301464 - DNA, 386 bp, Glycine max
  unsure (1)..(386): unsure at all n locations
aggcgagttgattntagccttagtttcaccttagttattagtcaattcggttaagaatgagaaatcccaaagagaaaatgtccggttgattttcctctctattttactaaaaggtatatttttgttattatattattattttatctctttttgatttccaacgtggttacggcacgaccgaacggtcgaaatttattttaaccaaagtttacggatcatacaattcaaacgttcggcggaaatttattttatttttaagttaagcgagaaatgacttgagtaaaatggcttaagcacgtcaacagggggtataaaaagtacatgaaatgagaataaaaatacacgaaacacaatgtggaccaccacgggtacatataatgaatcga

SEQ ID NO: 301465 - DNA, 265 bp, Glycine max
tgtttgcatgcgtgatcctcatagcctgtcacagccttgagatatgggagcgaatacagtccccgcgctcggactctcagaccattatgatagctcgcgatgataccattactgttgtccctaagatctctgtacttgattgacgccgcatcccatgccttgaaaactgcatggagtacccttccgtcgcggtcactagaaacttgtgctatgaaacgcgagatgtaccaactgacggcctacatctatgggatatccttccatg

SEQ ID NO: 301466 - DNA, 340 bp, Glycine max
tttcttggagaagatacatttgcatcaaaggagatgcaaatagagtctgaacaacatatctaaacatgtcgaacatacatcggtcagaactgcagcttttagaaaatttctaccaactttgactttgttaatgctattccaagagatcaaagcacgcatcaaagcttaaccattaagcaaaatgaacaaggtcatttggcagaagctcaaatcattgatccatgaaactatgacagcttatccacgaactagaaactatacctcgaagcttaaccaattaccagaagtaacaagacttaaccgtcaagagtagaagccaagcaacagttcaatgcttaac

SEQ ID NO: 301467 - DNA, 412 bp, Glycine max
agcttgttcattattttttaagcatatttattgtatacttatattattcttatttttaatttttctttactttgcttgaggacaagcaaagttctacgttgggggagttgataagtgccaaaattcaatattttttgggattaaactgttagcacttatctttcgattgcaatagttttcttataaactacctttaaatctagttgttttatatatattgtacatttactaatgttgctgtttaaatatgaaagattcatccatgattctgtaggttttgagggttgtttgttagatccaaaaacaaagccaaaatggtcttttcacaaagatttctaaccccaaattcccccaggctagcaacctgctcgcctgggctaaagatcttactttagccctaagcaagcaactc

SEQ ID NO: 301468 - DNA, 415 bp, Glycine max
agctttaacgtttatggcaactcacagtgggttctgagatgctggacattgagaacaaatatttcatgatacaatttgatatataggaggatcacacaaaagtcatggaggagggaccttgatgcaatcctaccccgcatgggcattggatagagaagactccaagtagattgcgctagagctactaaagaaggccctaggatctcatgaaccttagggtagattctttagcccatgggtcaaggttggatccactattctttgtaaatcttagaataggtttttccttcttttgggccttgtattttggtcattctagtagtatagggttctagccttgtatttcagggcattctgagtagtctttgtagtacggactctcttttttgcgtattttcatgtattcttggaatga

SEQ ID NO: 301469 - DNA, 370 bp, Glycine max
agcttttctctcttctcactcagccaaaagagagaagttcagaagccttttctctccctctctcacgtagctatctacttcttcattcaccattgaagctccacacaaagcttcaacctttggccatcatttctgccccaaatcgcgaaaggagagcattttcggggtcgtgaagcgcgtgtctacgagtgggacttcgaaatttcatgtttgggtgaacttctttctcctttgattttcgtgggtatggggttttgggagacatgatgggtagttttgttagttctctgcttcatgatagttatttgtgaagactcttgttgaaagcttgttgaaattgccatgtttggatgagttaaacatacccatt

SEQ ID NO: 301470 - DNA, 413 bp, Glycine max
agcttgcaccatgtgcctcagcagcacaagatgagaatgctagtgtttctcagagttgctgtgctcacgtgaacaaaactgcgcagaaccctagttgactctgtgcagttcttctctctatcacagccaagatggctggcgtcaaccctcaagttgctgtcaccatccccaagcgttgtaacctgcctaatcgccctgttggttacaagtgtggacgtaagtgcgattaattaataattaccccttctttatatatacaaaggagagttactcacgtgacactactttgataaagatgctataaaaaaaagactattcaattatcaaaattgaaagaaatatacacatatgtatatatataaatatatatatatatatatgactctttctatgataactcttaagcttaacta

SEQ ID NO: 301471 - DNA, 382 bp, Glycine max
  unsure (1)..(382): unsure at all n locations
agcttgtcggttttgcaatcgcaaggtgatgtcacggctgactcgttccatgagtcttgctatccagcaatcgataatgtggatggattcagcttctgaacctggaaatatctcaaagatcgatcttcgcattgctgatcttcaagatcatattcacaaatgtaagcaatgtaactcaagcatttctgagtactatacccgtctaaagattatgtggaaagaactagaattgcatacatgcatgttgctgagtatatgtgctagctcctgatcttgngggctgactgtcacactcgacagagaacgtgaagatgactgtgtgattcattctttgtgtggcctcaatgatgtctatgcacctgacacgcttatggaacctatg

SEQ ID NO: 301472 - DNA, 389 bp, Glycine max
agcttttgtcactccacccgaatcgagcctttaggttaaccaaagctagcacagctgataacctagtaaagcttttgcatccaacatacaatggcgtatgcgcatctgtttgaagagcatcgtatatatctgcatgacattcccgacagccctcttgcccaagatcacgtatcatgtcttccatgagatcttcgctttgtagatcaaccggatgaggtggacatgttgctgtatgaccaaccaactcaccatgccatatccactttgtgtacgtcgggctaaagccatcacatatcagatgcgatctaatgtcatccaacgaatgacgcctcccgtgacacatttaacacaagggcagaagaagttgccatctgtggttgctgaatgta

SEQ ID NO: 301473 - DNA, 404 bp, Glycine max
agcttgtttctcacagttccaagatataagagagcttcataagagatggcatgtcccacttttgcttttcctatctagcttgcatgcacaaagtcagaatctgaaaagccaattagatttaaggaggcacctttgggataacacatgtggcatccctaacttaatgactgttttaatagtaataaattaaatagcagaaaccatggaaatttttttttgcactgttatttatttcacgataattaatttcagaaggaaaattatcactatagagtcctgagtggccagttcacaactctattcggattcatttctttctgatcactcataacctccaaactatttttctttttctaaaaaaaataccagccatcattttatgtcatcacgtgagaaataataag

SEQ ID NO: 301474 - DNA, 412 bp, Glycine max
tttgcaagtcttgcagcacactagcaaacgtagaattatttggaacaacagacgactgcctcattcgacaaaacaactccaaagcctccctacttttatcactctgagcataccgcgctatcatgagactccaaggaataagatcatctttcggcatttcttcaaaaaactgctgcgtctcagcaatctctccagacttggttaacaattcaagcagcacagtgccaacataaagatccctatcataacacgctttcaaagcacatccatgaacacttttcccaacctcaaaattgttcggtctaaaccccataaccctcatctggcagacaagtagcaacgaatcttcatggcagtaattctcagcatagcaagccatcatcccagtccaagataccatgcccttacaaca

SEQ ID NO: 301475 - DNA, 404 bp, Glycine max
agcttatttgaagtgaatggattagcatgggcagaaatgtctccgcattgattggtaaatctgttcctcaaattcctgaaaaatgcaaagatccaggtacattcagcataccttgtattatagggaatagtaagtttgacaatgccatgctaaatttaagagcttctgttagtgttatgcctctgtctatttttaattctctatctctaggtcccttccagtcaactgatgtggtaattcatttagctaatagaagtgttgcctaccctgttggtttcatagaagatgtcttacttagagttggtgaactgattctccctgttgattcttatattttgaatatggaagatggattctctcaaggatcagttcccatcattctaggcagaccctctatgaaaact

SEQ ID NO: 301476 - DNA, 392 bp, Glycine max
tgtcttttgagaaaactgccttgagaagacttccttgagaagctagagcttagctacacacacccctctaataactaagctcacctccttaagaagcttcctttacaagattcctacagaagtgagagcttagttacactcacctctctaatagctaagctcacctccttgagatgagaagctagagcttatctacacaccccctataatagctgagatgacgccgcatgccaaaatacatgaaaatacaaaaaaagtccctactacaaagactactcaaaatgccctaaaatacaaggctaaaaccctatattactagaatgaccaaaatacaagcccaaaacgaaggaagaacctattctaatatttacaaagaagagtggatccaacct

SEQ ID NO: 301477 - DNA, 326 bp, Glycine max
ttcttgacgacaaaaatagtatagtcttgtgatctattaagcgctccatgtcttttttgaactattcgattctcactcattaatattgagttacatttctcgctagcaacttaacgtaatgttggtaacctgtttaacaacttgttggacctttctattcgcaaaagattctttccagctatgttctttgtctatctattgaattgtaatggacagactagtataattatcaaatcatttaaataacgatgtttttttagatcattatagtcagagacaagtaaagaagcgaatcaaatctatctgggaactcaagatgtgatgac

SEQ ID NO: 301478 - DNA, 379 bp, Glycine max
  unsure (1)..(379): unsure at all n locations
ttctttgatcaaaanagcatttgtcattcttaatgatcttcaagcaaacatctatttctgtctgaagatcatgtgcctgaacaaccctactgaaggcagctgaacaaagatattctgttacataatgccttccagccaagactgtatctagcacaatgggcagctccttgttttcttcaaatccagtcctgtatgtgcaataatggatgagagcaaattatactcaaatacaatgcacgtctatttaaaatacctaaagagccagagtgaagagccaaaattcanattccacaataaataaatactgagtcaaaatcacgatgcaattagttaaaggcaacacatccaatagttgacggctcaacaagtaaaagccaac

SEQ ID NO: 301479 - DNA, 389 bp, Glycine max
agcttagaattagttaaggtttcagtgtgttgcattcactcttaagctcaaaacttgaaatgattttgcttagctctaagatgcatcagaaagttatgtgaaccatccttgatttcgaactaaatagtttaaaaggtcatgaacagtcctcatattacgtattgaataaacacttgagcttattttaccagtggatgccagaagctcaatgaagtaaagaagagagaaagattaacgtattactgtattacagttagaatatcaaagtaaactttaaacaggtagagaaacaaggcgaaagcctattaatcatttgacgaacatgatacattgttattatataaacaattgttcttatataaacaattacttcacactatataacatat

SEQ ID NO: 301480 - DNA, 397 bp, Glycine max
  unsure (1)..(397): unsure at all n locations
agcttgtctcatataatgacgatctcgaactgattcaccgttggattgttgtgaaatttaagcattaggatcgcaacgcaattccaagaattctaaccgttggaaattgtgatatgatgtctgggctgagataaatatccatcgcatcgtaaccttttcctttctccgagaaacgcagagttgtcttggtaaaactacaatcccggtttcgttaaccgttagattatcgtgaaattcttatattttgttcgtgatccaatcacgcacacctncaccattgggatttgcacaacagtgtctatggagggagaaatatgcatcacacgaagcagtatagaatggaggcttcaatcgtttctctatctctctaatgtttgggaactctatcagagcaatc

SEQ ID NO: 301481 - DNA, 415 bp, Glycine max
agcttatctgctttaataaactctgggccagtattagctaatattgctcttggtacgtgtgattaattcaagtttcacattggctagagataagacaaagatagaatatataagtgggagacaaccctcactctatgggctaactgttaaaattgagttaggtccaaactcgcattctagatggtatcagagcctatcttagatctattaacaggctacccgccatgttatcagcgcaccatacccaaaagtgctgctgggcatgaggagatgtattgagaaaaacctcggtcccacattgattaaagataacgtcaagatagattatataattgaggtgcaaccctcaagttgaagtatgtatgtcatgtactaagcttcttataaataaagtcaacctgaggccaagtgattc

SEQ ID NO: 301482 - DNA, 404 bp, Glycine max
  unsure (1)..(404): unsure at all n locations
agctttataattgtttatatggcttgaaacaagcaccgaggcagtggtacaagaagtttaatgagtttatgagcaactcaagattcaacagatgtgacatggaccatttttgctacgttaagaaatatactaataactatgttatccttgtcgtgtatgttgatgacatgttgatcgcaggatctagtatggcagaaattaacaagttgaagcagcagttggcaaaaaaatttgaaatgaaggatcttggtccaactaaacaaatccttggtatgagaattcttataaacaaatcanaaggaattttanagctgtctcaggagaaatatatacacaagttgcttgacaggttttaccttgaagattctaagaccaggaatacccttttgggatctcatttgaag

SEQ ID NO: 301483 - DNA, 414 bp, Glycine max
tttttgcattcttttggagtagaaacatgggaccaactcattttatttcaaaaaggaagtcatatctagtcaaggtctgagagaccatacaagtttcctaacgatttctaattatgtgggccattaagtctatcatatgctgacaatagccgagaagcccatgaatctcttcgggggcggagtaggtgtctgccatcgccttggccttggctaacaatcggggaagttcttgactcccgttcaacgtaagagcaaaccgatccatccacatggttgcctcttggtgtaaagagtcgatcacccttcctctagcctctttttccgcatatacttgcgcatactcatccgcgattctatgctcgtgggccgtggctagacctaactcttcttggtacttggcgatgatagctaaca

SEQ ID NO: 301484 - DNA, 398 bp, Glycine max
  unsure (1)..(398): unsure at all n locations
agcttggagaggatgcttcaatggaggaaaagaaagagggagagaaagagagatgagggagaacgaaattgaaggaagaaaaagggagagaagttgaactttgagttgtgtctcacaagactctcattcatcaaagttacaaaaagtgttacacatgcttctatttatagactaggtatcttccttgagaagctttcttaagaaaacttccttgagaagcttctttgagaaaacttccttgagaagctagagcttagctacacacacccatctaaaaactaagctcacctccttgacaaaatacatgaaaatacacaaaaaagtccctactacaaagactactcanaatgccttgaaatacaaggctaanaccctatactaatagaatggccaaatac

SEQ ID NO: 301485 - DNA, 408 bp, Glycine max
  unsure (1)..(408): unsure at all n locations
agcttgagtgaactcatgtgggatcagctgaagcttgcaagttggagaccaattgtgcgagtccatcaaggctcccatttcagaccaaatcgacaacctttgttagctgttttgaggcataactaaaactgtgagtcatgttagggcttgctttctctctgtttgaaggcaactctattctctcccttggaaggcacggttctctgttcaacggtaacaaaaaaaatccctgttttgccatcattttgtttgaccatatttcagatttctctggcaattttttaaatttcatatattttccctacatcagaatgaanaatgggttcaaaaccctgtagtcattcaaagaatgacacagttggttgctgctctgctcctttgcaccacttctctctgaatgatgactta

SEQ ID NO: 301486 - DNA, 400 bp, Glycine max
agctttatgacagacaatgaacctttcaaggcttcaatttttttactttccaagaatgtttttttgattattagactattgggtccttagattttttttgagtcatgaagcgtgtttctgagggcgatgcaagggtttgcttataagattgtggtaatgatgaagagtgagcagctatttgagtctcaggatggccccatcatactctctcaggtaaacttttgaggtctttcatttcatagcatttaattttaatcttcattgctttctcttcataccactaatggctatgacttatgagctcttcactctagatctagtttaaattttaatgatgcattcatgattcgccatgtgtttgctgctctagattgagaatgaatatacggcacaaagtaag

SEQ ID NO: 301487 - DNA, 406 bp, Glycine max
  unsure (1)..(406): unsure at all n locations
agcttctatggaagctacctagtctataaatagaagcatgtgtaacacttgctgcaactttgatgaatgagagtcttgtgagacacaactcaaagttcaacttctctccctttttcttccttcaatttcgtgctcccccctctctccttctctctttctttcttttcctccattgaagcatcctctccaagcttcttatccaaggctcatcttggtggtgaagctccttcttccattgcttattccctagtggatggcgcctcctctcacctcttgtcctttgtcttcggctgcatcttcatggtggaaaatcaccattaaaggacctcattgaagctcanagatccagcctctatagaatncccacaagcaagctctcatcactaatgacactgtcaactctgat

SEQ ID NO: 301488 - DNA, 408 bp, Glycine max
tgcttttgtaccatgatcgtcatcaagtgatagagtctacaaatctttagaaaacatgcaaaatccaactctttcactcaattaaaaggctatactgctacaagacaaaactagcatccaaacgtgagttcggccaagaaaatgcatgaaactgacacaaaaactcacacaaaatattacataaaagtggtttatcaacaggcacgaaccacacgagcaataacacaagggtgagcttataaaaacaaacatactaaaacaacaatacaacttaacaattcaagcctaaccacatactaaaacaacaatacaacttaacaattaaagcctaaccacataccatcgtatatagaacataacatgcagaagtcatgtataaaacataaatcttagaactacataatagag

SEQ ID NO: 301489 - DNA, 402 bp, Glycine max
agcttgattgaactcatgtgggatcagctgaagcttgccagcaggacaccaattgtgcgaattcagtcaagctcccattacataccacatagacaacctcacttaggtgccttgacgcataactaaaactgtgagtcatgtaaaggcttgctttctctctgttcgaaggcaactctattctctcccttggaaggcaccgttctctgttcaacggtcacacataaaatacctgttctgccatcattttgctagaccatatttcacatttctctggccattatctaaattctatatattctcccgtacatcacaatgaacaatggcctcataaccctttactgattcagagaatgacacagctgcgtgctgctctgcctctttgcaccacttctctctgaatga

SEQ ID NO: 301490 - DNA, 69 bp, Glycine max
gccgcctgtctgccttctttgtgactgtctggaacgcccgcgaggcgcgatggagatgatgactactac

SEQ ID NO: 301491 - DNA, 109 bp, Glycine max
ccaaaaaaagttgctaacatacaatcttgacacttaagctacaaattaagccacatgatctgtttgtcatcgcataaaactcagcaactcaccacggtttaaattctac

SEQ ID NO: 301492 - DNA, 101 bp, Glycine max
taagctttatccctcgggtttttcaccatgcggctcatgtcgcgtgccttatctctaacatattaccgaaaaaaggccgctaacatacaatctctggccct

SEQ ID NO: 301493 - DNA, 458 bp, Glycine max
  unsure (1)..(458): unsure at all n locations
ggagaagcgcgtgcttattgaattcgtgagtcgaacangcccncngagttgatgtgttagcaattttcttctttttaaaacacaagcggagttgtgtgtggtttgatctatagtctcctatccaacgttcagtcggtataataccgatgacgcatatttcagaattctacctttcgcattgagtcgaactgtatactatatcttagacgaatgcttattactctgacgtttagctgtcattggaagctttactttttaatcttaatttacaattcacacatttattagctaacatagaaaatatgagatctcaatacatgcatgttattacttggaaactctcaaattcaaataattccaaacttccaataaaggataacggtctgacaacatctttaaataaatattttaaaagtgcctagccttagacatggttacgtcgacctacgttaagttcc

SEQ ID NO: 301494 - DNA, 310 bp, Glycine max
agtttctatcgagataattaaaaagcagaggctattgctcgagaagaaaagaggaaaagcttatgaacaagaaaacaaagaaattgagcaagatgatcaaaacaagcttctgtcttattcattgagcaaaaggaacttatatacagattgagaatagatccaaaaactaatacaaaagcagttacaaagtttgctacaaatctgttagagttcaaaatgaatttggcgggaaatgatagcttgattaagatgagattctgcttcactcggcgccggcaccgtcattgccgcctgtcggtgtgcctgcact

SEQ ID NO: 301495 - DNA, 296 bp, Glycine max
ctttaattagtgtcctaaatgtccttaaggaactacctatcattctccttaataataaagcacttttaaagatagaaaatatgctccaaaatcgttcccatttcaactcttgtagtgctattcacaactcactaaatctctttttccatctttaggactggacttagaatggaattatggaaatgaatccttaacagaggcttcaacaattttgagagatgctggcaagagcaagaaaagtcttgcatgtcagttgtttttcttttttgcacttccgatgtttactctattcttgc

SEQ ID NO: 301496 - DNA, 174 bp, Glycine max
catgtaagttttttatccaaagctcattcttggcggggaaactcctgcgggcatgggtgagccacctgcggatggcgcctcccctctcctcttcacctttgccttccgctgcatcttcatgggggaaaatcaccattgaagctcaaagatccaacctccatacaagcttccccc

SEQ ID NO: 301497 - DNA, 246 bp, Glycine max
ctcgatcatcgggttggtttgtgtgtatctgggaggattcttcgccctcgaacaccaagcataacacctgttgtgttagagattctttgactataaaaccacattattaaccagttcggacaactaaggttacgcaaaataaatgttaaaacaaatttagagtgagctcttgcggccaaccaaagatgattactcttttcatgtagggaatgtgccatgcatcaatgggaaagagcgcactcactc

SEQ ID NO: 301498 - DNA, 290 bp, Glycine max
  unsure (1)..(290): unsure at all n locations
taagttttagccttcgggtttttcaccatgtggctcatgttgctggccttatgtctaacatattatccaaaaaaggttgctaacatacaatcttgacacttaagctagaaattaagcaacatgatttgtttgtcatcgcataaaactcagtaactcaccacggtttaaattctactgagaagcgatctacaacgagataaaatcaaatgaagcttattatgaccgcgagtatttatgtnccaagaaaccattaaccactgaatttcatctaactaatacttaattattga

SEQ ID NO: 301499 - DNA, 455 bp, Glycine max
  unsure (1)..(455): unsure at all n locations
gggcgggcccgcccgactcgtctcgactgcatatagtactatngcgcgtttgtcagcttgcacccggcgcatctctagagtctacctgtttgcatgcaagcttatcctctcgtagagctaaatccagaggagaaatgcctaaagagaactccagatcttgcttcccattatggtcatttgatacattcaagatctcaacggaagccaaacaattgttacacaaaattctactgttaagtcaaaacaagaatgccttagaacatattacaggacaagatatagcccacaaacataaccagctatcaatgcgaggccaatataatagcacattcncctttgggcaaaatgcataaaccaacgctacaaccctagccaatacctacgatggcctaatccatgagaatacccctagctcacaacatcgtccctttgggcagacacactcctcaacttgc

SEQ ID NO: 301500 - DNA, 245 bp, Glycine max
agtcttttcactcggagatgtgattcaggcgcataatatatcgagacgctcgaaaacgaacaacggaagctctcgagaaattccaatggtcattacctttaactcggaggtctgatttacgcgcataatatatcaagacgctcgcaactgaacaacggaagctctctagaaatccaaatggtcataacctttcactccgaggttccgattccgtgcatgatatatccacacgctccaaattgaac

SEQ ID NO: 301501 - DNA, 479 bp, Glycine max
  unsure (1)..(479): unsure at all n locations
gcgatcntnntatggtacctcgcattcnngttcgtttagnntacatacanctcgaattnggnnnatatattattgatacataattttgtgttcttgnacgaancgatttgggcgagattgtgttgatatgaattgtgaatttccaaatctgcacttatgcanaatttttgctgggaaattgtgcagcagaatcttgcacaagtgcagaaaaatgcttgtgtgtggttggctgtggaaagagcagtgcgaatgagttctggatgttcgctagtagatcccaacggtcaaaatgtatgcttatgtactacagacttccagtaaaaatttggagtcgatccaacggttaacgaattggaccaaagaattgttactgtggtctttatgtgagaaaagctgcgattctggttgatgtgttgaccagaagtttctgccttcgctctgttttgcttggctgcgatagcttgtgctgatcgaatgcg

SEQ ID NO: 301502 - DNA, 153 bp, Glycine max
cgcagaactggtgcgtatctataacacactgatcaaccattcacaggaagagacattcggagtgcatttgcagcatatgtataataatgctggacactattggaatgaatgagcctatgagcatctgcgtaaattgactgcagagtgtcgcat

SEQ ID NO: 301503 - DNA, 117 bp, Glycine max
caaattgaaggaagaaaaagggaaaaaaattgaactttgaattgtgtctcacaagactcttattcatcaaagttacaacaagtgttacacatgtttttatttatagactacgtacct

SEQ ID NO: 301504 - DNA, 302 bp, Glycine max
aggggttggaaaccctaattcggccggaccattggtggatgcatgcaaccttgcttgaacactagaaggccttgcaccccatgttgacaatacttaaagttccatacgtgcccaaagcaaaaaaagcatggtgcacaacccggaattccgaacatgccggaatcaaaaagaaccatgatccccatccggaagatcataacatccgaagccaaaagggagatacgtaactgggagtccgcacatacacaagaaacaattcgtaccgatcaaaactccgaacgctccgaaagaccacaaaaacc

SEQ ID NO: 301505 - DNA, 277 bp, Glycine max
agcttatagtatgcccgagtcatttatccctgtgagatgttgttgaagtattggcgatcagaattgccattccttggattatagggttgaaccaagctcatgcttttacaaaaaaggttcatcaagtcaagttgaaatatggaagtaaccgtcttgcaaaattggggcaaaagatgaatcgagtcacatcactgcttcgtctactgccaaacatatttaggattattgatgtccttgttacttccagtttcacctttgacaagatgtcatggaccat

SEQ ID NO: 301506 - DNA, 256 bp, Glycine max
tgatgtttgtatttatgggatgttgttgtatgtcattcttgttttaagagtagtgtcccactggtaaaactaactttccaaatgtttgccttcgcaggaaatggccccgaggaagcttgcctcaaagaggtccaggaaggacaaagcagccgaaggaactagttccgctccggagtatgatagtcaccgctttaagagtgctgtacaccagcagcgcttcgaggccatcaagggatggtcgtttcttcgggagcga

SEQ ID NO: 301507 - DNA, 369 bp, Glycine max
agcttgttgaagaagtttccaaacaaaaaagggagaataagtagaagttaaagcacacgacatcatttgaatgggagcctaaagtatgaaggaagcatcaatttagggggagttttttattcaagtttaaatttctgccctgaaacattttattatgtactcaaaacacattttctttatatgaataaaatgagatgttttttgttatttgctcacgctctatctcaaagtcttatgatgcattattatttggttatcatatatactctctgcatctaataagcctaactaatctcttattgtgaagtcttacaagcatactttcaacttttaaatctgtatgtgtctgacatcatcaaaaatgaagag

SEQ ID NO: 301508 - DNA, 334 bp, Glycine max
  unsure (1)..(334): unsure at all n locations
cccccccaccanacttaaagagagaaaaatttttttctaaaacacaaccagggacgggtagagaaaaaaacccccacccaccccaaccgaacaaatcaaatcgcacaaccccgcaaacacgacactaaacccaacaccgcccaaccccaaacgaaccccgagcgaaaggaaaacagagaacccaaccacacaaacacgcccagacccaaagaacccgcgccacaccgcccaacatcacctgaacgagcacaaccaagcacaaacaaaacaacccccccaaaaccagagcacccaccaaagacgcacgaacacccaccgccaacacaacacacca

SEQ ID NO: 301509 - DNA, 144 bp, Glycine max
cattgattttaattacacacccttttttcttttattgaacgtgatggtattatgtggaaatcctacaagtttcctgcatttttactcacacaaagtggctcaaagactcttcaagacgtatttaaaacaaaaaacttgtgtgta

SEQ ID NO: 301510 - DNA, 257 bp, Glycine max
ctgcacgcatgcaagcttattctagacggctttcctttttttagcaagttcctaagtcagtcggttttaaaggcctccgactgagtacaaaatgacttgtagcaatttggtaagtaattaaaaactcctctgcatgtccaattttaaaatcctatagatatctaatatgaattccatgctcatttcaagatgtgccgagtaccatgtactcacatatgaaagctataagattcactatctgaacttgcaatggacta

SEQ ID NO: 301511 - DNA, 284 bp, Glycine max
tggagccaagcgagagctcaaaaactagacaaaataggtaaggatgtgaggaacaaggctagacttgtgaccaaaggttactcacaataggaaggcatacattatattgaaacttttgatcctgttgctcatctataggcaatatgcaatatactatcctttgttgctcatcatggaatgatgcggtatcaaatagacgtaaaaagcactttccttaatggacttatcaagaagtttatgtggaacacacccctgggtgtgagaggactatctaccctcatcat

SEQ ID NO: 301512 - DNA, 188 bp, Glycine max
tacacacttggtcaaactcatgaaagaaacacaaactccatctcaaatattgcctcaattcaaaataaaagcatacaaccatttttcacaaaaaagatataagcggttcattgccatgtcattcaaaaacaagttaaactatttcaaataccttagaataaacaaacccactatttattaattaaact

SEQ ID NO: 301513 - DNA, 216 bp, Glycine max
gcatgcaagtttctacattcaatgcgcgactcttcgggtattacgggactcaatccgacatcccactaaaaagttattgcagcttgaatctgctcaagagcttcgtatttcatttccagcgtctcgatatattaccggactcaatccgacatcacagtaaaaagtcattgttgttcgaattcgctcagagctccggcattccatttccaccatctc

SEQ ID NO: 301514 - DNA, 310 bp, Glycine max
tggcatgagggctatctctttgccgacactttacctttattactccctacattattcatggtgccactgtacacgaccaatcttgcttaggacatggcaatatggcccgaagacgatcccaactcccaacccccgtggacgaaacactctccatatgtgaccacaacctctacactattcccaagcctcttcccctggattactacaaacatccacaactatttctgactactctctcccacccaacacacacaccattttctgccacagcaaaatcctactgactatttgacaccaactttttcttccc

SEQ ID NO: 301515 - DNA, 465 bp, Glycine max
ggcgagccctgccgcgtgcccagccaggtgtttgcatacacactttgggagtatgcaaactccccccgcgggaacctatacattatatccgcgagcttgcgagcttgcaggcgacggctcggggtgaagatggctgacaacgctacctctgcaacacatggctacggaatggagaccgggaaatggtcaatagagacgccactattgtgagaagaatagtgaagcacgacttcagtgccagatgaagacatggatgctcacccagtatgcaagacacaatgattgcgcgccagatgccgataaagatgttcgccatactgaggtccgaacgctgaagtcctttcttcacacaatgcagaggactcaaccgatgaataggatcacgccttagaggagactactgcactactgtcaccagaaactgatcaggtgatcttactgacctgtaagaagttccatttgacc

SEQ ID NO: 301516 - DNA, 470 bp, Glycine max
  unsure (1)..(470): unsure at all n locations
ggatggacnccgagcacccgcanttgtgtgttggaacaccgctcnganttaccctggttgtggctgtgtttctcattttgttccccttaactctaacacatggaacttatggcgacctctagcctctacttcatattcaaactgaaactgacgagaacctttccatgaatttggggagtgactcatctgtcgtctgctgaatgattgtgagtgcaactatacgcaagtggggtgctttactcatcatgaactgggctccaaaatgcacaataagtgtcctgaaagaatctattgagttccttggcacatcaatgtaccattggagtgttgaagcccttatgttcatcacgaatacttggcacattatgacatcattattcgcgaatagatttatttgcgttagcgatgcatctatatgcttcttctggatccgacagttcattgtatccatctattggccattgcttgcn

SEQ ID NO: 301517 - DNA, 321 bp, Glycine max
  unsure (1)..(321): unsure at all n locations
agcttttccaacatcaaagtaatacaacattgaaatagcacaagctatcacagccaagcaaaacagggcaaaggcagaaaactctacccaaaacaccaaccaaatcacagcttttcacacacaaataccgcagaaacatttccttcgctccggctcattaacccgtggatcgacttcaaaattttactggaagtctatagtgcataagcctacattttgaccgttgggatctactagcacacattcagaactcattctgcactactctcttcacagccaaacacacacaangcattttctgcacaaaagcaaaatcctact

SEQ ID NO: 301518 - DNA, 381 bp, Glycine max
agcttcagtccctgagattttggttcccagaagacaacagggagtgaagattgctgaaaaccctagctctgcaacaagtcctagggaagtagacccggagatggacaagaaaatccgcagtattgtgagtagcattctgaaagatgcttctgtgcctgatgctgagaaagatgttccaacatcttccaccccaagtgtttccgtgcctgatgctgagaaagatgttccaacatcctccgctccaaatgctgaagcccttccttcacccagtgaagaggaatcaacagaagaagaggatcaagcctcagaggagactcctgcaccacgggcaccagaaactgctccaggtgacctcattgacctgcaagaagtcgaatctga

SEQ ID NO: 301519 - DNA, 344 bp, Glycine max
agcttctcaaggaagttttcttaagaaagctgctcaaggaagggacctagtctatgaatagaagcatgtgtaacacttgttgtaactttgatgaatgagagtcttgtgagacacaactcaaagttcaacttctctccctttttcttctttcaatttcgtgctccccctctttctttctctccctctttcttttcctccattgaagcatcctctccaagctttttatccaaggctcatcttagtggcgaagctccttcttccatggcttattccctagtagatggcgccctctctcacctcttctcctttgtcttccgctgcatctccatggagtaaaatcacca

SEQ ID NO: 301520 - DNA, 218 bp, Glycine max
tatttaatggtggtttgatgggttcattggttctatttgcatttaatttttgcatgcttggggactgatcacccatgtgtgtgtaaagtgaagatttttaacattggaaaatggtttgaatccttaaaactggatagaagagggctagaatactgtatgtctggacacagagtgtaaggatttaagttttaatatgttgtaatcggaatgcaattcat

SEQ ID NO: 301521 - DNA, 155 bp, Glycine max
  unsure (1)..(155): unsure at all n locations
agcttttnccttattttcctataattatggggagaagtgaagggaaaaaatgttcaaccctcctagcaattccagatcacttcaaatcagcgacgaaaatcgcctccgtgaagaaaatccaagccaaaccgcttccgtaacgttcctgtgggtga

SEQ ID NO: 301522 - DNA, 358 bp, Glycine max
taatattcgattattattcttgtggaaccttcacccgacgaagacactgacaaaaacttatcttctccttcttggacaaagtatggcaggctgggggcaaataaattttcttcccatcaaaccttggatgcaactgtgatcttatacccatattaactagatcttgaccggtattcaagccatccttcgtcttgccttgaatgttaaggagcgttccaatcacactgtcacaaacatttttctccacatgcataacattaataccatgtctaaccgtcagatcaacacagtacggaagatcaaagaaaatggaccttttctttcatatgcaactctgacttttattctttttttgggt

SEQ ID NO: 301523 - DNA, 283 bp, Glycine max
agctttacgaatcccgatccaacccgggcatagtcagtgagtgagaacctgtgatgtgcctaaacaggcgagctcctggcagtcaacagaatatatgaacaaagaccacaaagcaaggaggcttgtgtggtggctggccagctgtgaactttgagtgttatatgggatatgggctttggtaattgattaccaacggtgggtaatcgattaccacgcttaaaagtgaagacatgaagctaagatggcctctggtaattgataaccaaaggtgtaatcgattacc

SEQ ID NO: 301524 - DNA, 372 bp, Glycine max
ataaaagggatgccccacattattttcatgacacaaatgcaaaaatgatgatttggaaattttatgccaaactggtcatgcatgcacctatgccgacgctcaagtgtcaaatttttatggtcatgtgatgctagggctcacgattcatttcctctattttaaatcaacccaatgtttccaaaacatggtcttttatcaatttgtgcattcctccaagtccctttcgggcgtctggggaaattttcacagcattcacccttcaggtgtagacacgttcttctcttcaaaatcgggtatgatcaatgaactttttttcaaaaaaagttgaaatcatttttttcaaagcatgtcggttttagctagaaacttatt

SEQ ID NO: 301525 - DNA, 462 bp, Glycine max
  unsure (1)..(462): unsure at all n locations
cggcgcgcccgtgacgcattgaatantcatacggtgttagcaattcgcantccgggantttgctnancttcgcgcaggnatgccacgttgtgagacnctctttaaccttttgtgtggtgaactacagagcctggcgtttctacatttactcaccatcatagggggataatgtggaatatgcaatactcccatcctcgaatattaccccattgcattgaacgttcgcagttcctctccttcgttccatccctaactgccccctcataatggagaataattatttcctacacaaacacgtaagggggattgatcaaaattatcagcgcacatgaccatagagaaaacggaagcacagactaagaccaatctacccattctgagggcttgaacacggtccaactatctattgaccacaacccacaaccttatacaatatgccatgcccttacgcgtgctacggcc

SEQ ID NO: 301526 - DNA, 132 bp, Glycine max
aacagaataaaataaaatttgtatcaaacgaaacgggacctaaagtcaattgctatacaagaaacgagaatatccacgagataaattgaacaaaagacgggtggatttaataaattaattaccttttgagaa

SEQ ID NO: 301527 - DNA, 475 bp, Glycine max
  unsure (1)..(475): unsure at all n locations
cggcccgcccttgacgagtcgactctgcacgcgtgttagcancatcngcagttaggcgagctctcctacacgctgaatccgtctagcatctaccttgttgcacgcaagtttatgaggtccacggcgacaacaatgagaggtttatactacatgggcccttatcatgtgaatgccctatgaaatatgcggcggaaatggtgatcctcaatcaggtcaattgtgactaacatgccgcttaatacgttcgcacccgcagcatgcatcaaaggtgatcccactttcagaaaatgcgtatacaagcatgatgctcacaaatgacatgcaaggactccgctacaagtgctgtaaccctaacttcacccaatggccaggattacgccgacggaaaggaacaattctcttaagttttatcgtgcacaccgacgcctaaaagagctctagagacccctatgaccgggaacaagatcaggcgacg

SEQ ID NO: 301528 - DNA, 211 bp, Glycine max
  unsure (1)..(211): unsure at all n locations
ttcatgccttaatgcaaattnctatcaaagcatggggcctggacgtcttctataacaaggttctttaaaaaaatcacctagtcaattgcttccacaacacaaggttcgagatcgtacatgatccaacacaaacgcgcacgggagggcttatcacattcttacaaatgagtgaacacgacactatagattactggtctataaaatacactta

SEQ ID NO: 301529 - DNA, 309 bp, Glycine max
agcttctccctttattgtctataaatagggggagaagtgaactataaaggggttcacccccttacgcacttctctctttccaatccgctctgaaaaattgcctccgtgaaaaaactccaagccgatgcgcttccctaacgtttcccggagtgactccgccaacgtcttccacccttcttccaccgccctcattcattcctcaacggctcaccacctcaaaccaacctttcccactattctatgtacccgtggtggtccacatctggtccctgcatcctatcccccctccatttaccttttatcccccct

SEQ ID NO: 301530 - DNA, 213 bp, Glycine max
agcttgttatcaatgctaatcccaaactccggtgcatagggattatactcataatcagcttcccgaattgtctgctagtatactgggaaagctatacattaattaaactaaaccaaaccacccacacacattatatatttgtttgtaacgagaataaatactgacaaggacaaagtaaaacaattcgaatttatcatacagccatggctattc

SEQ ID NO: 301531 - DNA, 246 bp, Glycine max
ctctacagtctacctgtttgcatgcaagcttatggttttttagagcgaagttcatcggtgatcggagacgtataagacacttgcaccaaagctcatttatttcaccattagaagacctgatatctctttcgctgctggagtagctagccaatccatgccgaattctcatgttgatcattggaatgccgtcatgcctatccttacatatcattaaagacctcctgtacaaggattgctgtatgaaca

SEQ ID NO: 301532 - DNA, 342 bp, Glycine max
  unsure (1)..(342): unsure at all n locations
agcttgtcgcccagctggcccaagcgagcaaggttgcttcctncagaagcaacaaccttctggaggaatcttctggagggcccaagtgggcctcgctgctatttacaccccctgtttactaaatgcagcgcccttttctattcttttgtaattctttttccgtaacgctacgaaactttacgaatttcgtaacgatacctattttgcttccgcaaagctacgaatccctaccgattatgcattctactctcttttacctctcgaagaagatacggaaacttcacgattgcccannaacacctcttttcgatttcccgcacattacggaatttcatgaatcac

SEQ ID NO: 301533 - DNA, 288 bp, Glycine max
agtttgtactctttcatctgatggagtgcttaccatttaacttgccacacactatctacctcaacattatgtgcatcacaaactctatggatagccttgaagacatctattatgctgctctactcaacagaatcttctagagtaaaggagtttatcaagtcttctgttgatttttggacgatggatgatagagatatggtggacaataacattggtcatttggtctactattcttatcttctatattgatccgccaatcttctattatctagtggtgcatccagtcat

SEQ ID NO: 301534 - DNA, 238 bp, Glycine max
ttggcgataagtacctttgcaacgacatggtccatacatctcaccgacacatgtaaagccttgttgtgtcctcttccctcaacgggaatttcttcttctggaaacgcgatataagtgttggtgggtatatgattaacgatgcctttcaaacccttcactgagatatcatgtgctacatgggcatcgttaaggacctttatcacagcgcacgatgaggctcggaagttatgagcagttc

SEQ ID NO: 301535 - DNA, 329 bp, Glycine max
  unsure (1)..(329): unsure at all n locations
agctcacaaagagaaccatcttgatatgagggactctggaagtcctcttacaacgctatgcttttgaagctttgagattaacctcaagctaacatgaccaagcttcttatgtcaaacccaataatgctctttgactgagagtacgcatgaaacttttggactagacagatcaccaagtctaatcttatacagatttccttgtctcttagcctagaaaagtgaagaagtctccttgttctcaatgatacacatatcctngctaaagggacattgtatccactatcacataatttacttatgctaaccaaattatgcttcaaccctttaac

SEQ ID NO: 301536 - DNA, 181 bp, Glycine max
gcgggaattcttcaataccctatttatacattctgagaggttcgttgtcatgtggccatatcgacatccttctttattcatagcaatgggccactttttccttgaaatgcgaagcatcctggtgcttatggttgacttacttgacggatttttctaaattttgataaaataatatggctgc

SEQ ID NO: 301537 - DNA, 339 bp, Glycine max
agctttaagaaaaagatggcctcatttaatggcttatttccagaagggaattctatcaatagacctccaatctttaatggagagggttaccacaactggaaaacccgaatgcaaatttttattgaggcaatagatctaaatatctgggaagccatagaaatagggccttatatacccaccacagtagaaagagtttcaatagatggtagttcatcaagtgaaagcataaccatagaaaaatctagagatagatggtctgaagaggatagaaaatgagtacaacacaacctaaaagccaaaaacataataacatctgccctatgaatggatgagtatttc

SEQ ID NO: 301538 - DNA, 368 bp, Glycine max
tgtttgaatacaaagagtttactctgctaagcaaacaacaaagggtctatgttctcgttttttaccgcccaatacttttgacaaaatttcaccacttgcgtcctttagcgtccaatacttttggtctggatgcactgacgtatagaagggatcatatcattcctttgtattgggtgccatcctctttctttgattcctcgtccagttcaagatgtgtactcgaatgcatgcgtgtcttcattccttttacatcaaccattttgaacttttttagaagttcattcacatacttggtttgatgaactgaaatgcctttatctatctgcttcattctcgcctaacgcacaatttacgtccctatcatactg

SEQ ID NO: 301539 - DNA, 333 bp, Glycine max
agcttgtacatcagagtttaagacattcaaagcctgatgcgacacgtcttcaatccaacaattatcttgaaatctaatgccaactttgtaagtctaaacatgtttacgaaatattataatatctcattttgcctattctcatgataaaaaaagatgtttacaaaataacttacatgtttggaaacagtctacatctagaaaaacaaaatttcttaaaaaataagctgctttttttaatctaaaaattcgtaacttatgtctatttgtcaataatctttctttctttatttaaaccgctttcatactcttctgccgcgtcaaagttgattatct

SEQ ID NO: 301540 - DNA, 478 bp, Glycine max
  unsure (1)..(478): unsure at all n locations
cgcgtgcacanccacgccagctattagtgacatttagaatactttcgnntgcccctgtggaagttacttcatgaggatatagaagtttattttgtataatattagagggatccagcttgcacacgaatcctgtacaaataaccccattggatatttgctttttttaagaagatttctacattaaaaaaaaacctatgaacaatattattttaacagaaagatacatggtgttattaacaaaaccaaaaatccctaacaccatgggcaattcttaacttttttataaaatccctttttaaaagagtaaattatgaaaaaatgggttacaaaaaaatatttttttaccttagaatttttttggttgaccaaaggtttgaataaattaccattaaacccaggaattcatggaacccttacaaccttatttttttttcctttcgctagaatttccaatgaaaaaaaacaacctttggttcct

SEQ ID NO: 301541 - DNA, 289 bp, Glycine max
agcttacaatccttttgtttaagctgtaagcgctcttttacttgaaattttgtagcactacagtctgttgtgacaaaattactgcgattttattctcaaaatgtatttctttcgagtacataaaatctggcatgaacatctacattcttagtataacaaatggtcatgcgagtaacacgaaaaacattctttctcaaccagaacgtcacgctgctaatttgaggttggccttaatcctacatatgtccctagccaactaaatgatctatacccaacgatggctcaatat

SEQ ID NO: 301542 - DNA, 346 bp, Glycine max
tacgtagcagttttcttataaaatagaaaattttgaaccataacatcatagttgcataaatgcgcatcgaccaaatcatgggataattgattaaaataaaaagttttcaaaactaataacacatagcaacacattataattgattaacacaagagagtaatccgataaaatagtgaaaacacgaaatggcaaggtaaaacatgtattttcaaaaagagatagaataatcaactacagatcaacatatcaacatactatgacattaaataaaattaattgacataaagagcatacataataggctacatgtactaagcctaacatcattcaatgctagatccatcta

SEQ ID NO: 301543 - DNA, 273 bp, Glycine max
  unsure (1)..(273): unsure at all n locations
catgcaagcttgctatctagctcttccaggttttagaggtgcttcctccagaagcgggagccttctggaggaatcttctggagggcccaagtgggcctggttgccatttgcacccccatttttactaagtaccaccccctgcctttntttggggattctttcttcgtacagttacgaaaacttacgaatctcgtaacgataccttgtttcctttcataatgttaccgaaccctgcggattacataaccatcctcttttttgacttacgaatgt

SEQ ID NO: 301544 - DNA, 330 bp, Glycine max
  unsure (1)..(330): unsure at all n locations
actggatgctttggtcaacttgagaacctanctggccttgaatcacaaatctggagctgtcttaagggtttgtggggtgcgcccctcccctgaccancatatanacctttggccttccatgcagcaacctaaagcaattgagcagcctgaagcttatgcttgaaatatttacaatagaccttctcaacctcagcagcaaaatcaaccacagaagagcaattatgacctttccagcaacagatacaacccctggatggaggaatcaccctaaccacagatggtccagccctcagcaacaacaacaggagcctgcttcttcctttcaaaatg

SEQ ID NO: 301545 - DNA, 88 bp, Glycine max
acacaagagtgggtgcctattacgctgaacctacccttttacgccaacaatcagctatcggctacgccatgataattcccttacacct

SEQ ID NO: 301546 - DNA, 231 bp, Glycine max
cgcatggtacatcgggagctgtgtattttgcatgatggaagcactacaaaacatcacaaggtcataaccttacactcggaggtccgactcccgcgccttacatatcgggaagctcgaaattgatcaccggaagctctccagaattcagcaggaataatctttaaatcgaagtccgaccacgctcatagtaatcgataccctcgaattgacaacgacagctctctagaaata

SEQ ID NO: 301547 - DNA, 178 bp, Glycine max
agcttgcttgcggggcttgtatggaggctggatctttgagcttcaatgaggtccttcaatggtgattttacaccatggagatgcagcggaagacaaacgaaaagaggtgagaggaggcgccatccactacggaataagccatggaagaaggagcttcacgaccaaaatgagccttgga

SEQ ID NO: 301548 - DNA, 211 bp, Glycine max
cttccaggtaaattaaaaccttttctgataatccgacaccacctttacattggtattaatcaaatacataacatcccccagcagtgttaacagttgaaacccatcccaaagcaaatcacaagtgttcccacatggcttgacaagctggcttataaaaaaaatccctttgagtttttggcatacaagtaaacctatcttaggtccctaacaa

SEQ ID NO: 301549 - DNA, 470 bp, Glycine max
  unsure (1)..(470): unsure at all n locations
acgcggctgccntnnnncccttgcnctccacccttgtgggcattcgaccactttgaggaattatgcgaactcgccacccggngatcctctatagttaactgaagcttgtcaatttttaagtgcccaacaactgggacaacgtctctataatggaccacgatcattgctcctacttattggcatcgtcatgatcattttatctaagattgctactgttgttcccatcatgaagagctagtcctccctagtccgaacattattagattacttttcaattgaactcgcccagatcctagttgctcacttctttttttcctattcatacttgatggtgtgaaaacttcaccactctttctgataaccaacacattttgacctccataatacctcacaactatgctttccgacatggaactgctcatatttacatataccacacattttgcacttactatggcgggtctgccccg

SEQ ID NO: 301550 - DNA, 346 bp, Glycine max
  unsure (1)..(346): unsure at all n locations
agtttcaagctgcttggacatcaacttattgtgagccaaaaaagcatcttgtgatgacaactccaataaactacttttggtttggatatgtgttctgtcacgcaagattgcgtggtcactagtagccatattctcaattaactccattgcttcttcatgagtctttagtttaatttttcttcctacagaagcatctactaattgcttcaattgtggccttaacccatcaatgaagatgttcaactgtatacgctcacaagaatcatgtgtggnggtcttccgtagcaagctatggaaccgttctaaaacttcactcacagattcattagaaaattgatggaatgaa

SEQ ID NO: 301551 - DNA, 242 bp, Glycine max
gtataagggtatcgcgtaaaaacatgggctatattgtttattcttgtatgctaaacaatggataactacaactcgtttttgagcttccaccgctttggtctgtgaatcacgaaagcacttgacccatgactttcttatttagaaaaatgggaacaacttgacacatattaatatccattatggctatcaaattccacttagcacttaacataataacctaccattatcaccgtattatatta

SEQ ID NO: 301552 - DNA, 288 bp, Glycine max
agcttatacactatacatctaaaatgttcagggcccagaaaaggtgatgaggagatatatatgtgacgtgatgatcaccgaagcgctagcaacatatttataaaatatttttttaatatattttttattatcagctaacatttataaaacagattataaatctattaatagaattcattaaacacaaaataacatcaatcaaatctgtatttttcaatacaattcaaccacagttcacggtgtatttaatacagggggctggcgtttatctaaccatgataccgtacc

SEQ ID NO: 301553 - DNA, 472 bp, Glycine max
  unsure (1)..(472): unsure at all n locations
tgatcctatcacctagcattcgngacatttagtaaggtaacatctccacccangcnnaattttgtgtgagaagcgcccttttccttggcttatnccccaacggaaggggtcgtctctcatctctttaaccttggcctcccccgcatcccccatgggggaaaaataccatttaaggaccctattggagcttaaaaatccaacccccattgaaaccccatcagcaaggttccattccatatcttctatcatcctaagattgacccatgacaatgaatctattaaaagttactaccagctctgagaaactaactaacagtggccaatacgattgatggggaaaagaatgattggacttgcaatgtggggaatagaaatttgtgggtggctgtacaattgtcctcttattatataaaagggcgtcgttccaatcacaccaaaccttttgtttatttttttttcacgaatttacctc

SEQ ID NO: 301554 - DNA, 352 bp, Glycine max
agtttgtatcatctactttctacaaattgagggtttcatcaaagatttgtattctacaggataccaataccaaggtgaggattggtacaattgaagtgaatcgcggcctctatcaattcacccccgaagcaccaaaaacacataccatatgttctatcattacacacccaaagtgtctaatcctccctgtaaatctatggcattctcgtatgggtcaccccttctccgaaagattacaagccatgcaaacatacctatcctttcttaataataacaagagtttcatttgtaatacttgccattatgccaaacataagaaattaccttttcatctaacacatctcatgcatta

SEQ ID NO: 301555 - DNA, 181 bp, Glycine max
cactccccattcatgtgcttgtttttacggcaacagacaaacagcatcaatacccctcccaaaatgaaactagatggtccttgcttctatggctcagaccctacaaggcggattgttaaaaatccccaattttttgcttaccactcaagcccaaaatccgagagactcaccatagccttct

SEQ ID NO: 301556 - DNA, 253 bp, Glycine max
cgacgaatgatattgattatttctaacgtccgaatctcctctctactaattcattgtctgaaaaagtaggataatatttttctaaaaattttctattatcaaaaatggtaaatattcggcgattttattcctaatggttaaaattaaaattttcattctttatacaacaaattataattaaataaatcaaatttattgcaattatatagtttaaaatcatttttaacatctaaatactttattaataatatta

SEQ ID NO: 301557 - DNA, 464 bp, Glycine max
  unsure (1)..(464): unsure at all n locations
cgacgcgccccgtgacncattgacntgatcgaatttagcatatagccgtatgcgaactcgccacccggcgatcgtctagagtctacctgtatgcatgcaactttgctgctctctggggccaaaactaggcagctgaactgcaggtctcacccatatcaaacacctgttatttaacgaaataattttaaatgcaacaattgtcaggtacacaatttgaacactaacatactaacattatcgtctcagaaccaacattcagatgcttctgacacatctccctaactctattacttcaccaatggttgatctcaattaaaccaataacttccatctttatgatccacgaagatacgctttgtacctcattaagaccgctgatgatgcccgaccgctccctatcccttatgacgccccacatcttctacaccatcgcgtacctaaatccatcacaggtggcttgtccc

SEQ ID NO: 301558 - DNA, 455 bp, Glycine max
  unsure (1)..(455): unsure at all n locations
acgcgcggcnctccctcgttgacntgctcgcatgtacgactatcgccgtaggcaatttgctcacgcccccctctagagncnacctgtttgcatgccaattttatggttattaagctcacgaacactgagcacaactgaactcaattccctctcgaattcatgccaaatgaacggatccaggctccaccagatctttctctcactaccaccaatacgctatggcatacgtctcaattggcaaggcatctgcacactttgaatgaccccctttcatcttttcacaaacgcagtaaaccttatcctactcgcctacgttattgtgtcaatctccctatgcaaatccgcacccagagcgatccccgcctacaattaacctatactatcctccatgcacaatcgaattccgtccacacgaaatcctaccatacacttcccaattcggctcactacattcg

SEQ ID NO: 301559 - DNA, 250 bp, Glycine max
agttttgatggttttgagaagaaatcacatgtgtgtcatcatcaaaaaggcggagaatgtgaatgcctgtatacatgactttgatgatgtccaaagaacaatcaaacaacgctcattttgcttcaagattaatacaaaattgtttgcacaaacaaagccttgattcaagacttcctcaagatcaagccttgcctcaccatgaaaggcttcaagcccttcaccgcacacgtaatcgactaccaacggtttg

SEQ ID NO: 301560 - DNA, 171 bp, Glycine max
ccccatgcaatttattaagctataattaaacatttaagaagccattgaaatgtgccttatgttccaccatggcggttggaaatgcaacaatagaaaagcctttagaaaagtggatcgaggaacaaagaacaatatcgtagtttatatttaacgcttaaaacattattacat

SEQ ID NO: 301561 - DNA, 210 bp, Glycine max
agcttgaagtacaagaaatgagtacaaagagagggagagggggggggcaccaaatctatacctcaaataaggtctgaactttgaagtttaatttctcacatgatcaaagttgaaaaatgcacacacacggcctttatttatagcctaagtgtcacacaaaattggaggggaatctgaattttattcaaatttacttgaattgaattttga

SEQ ID NO: 301562 - DNA, 416 bp, Glycine max
  unsure (1)..(416): unsure at all n locations
aaacatattaattatgtataggagatttattatccattttattagnatatattttataccaatgtcataataacaaaaataatccacttaattagttaatttattatcatgaaatgtatgtaattaataaatatttaatgcttaaggtttaaaacaattaatatttcaaaacacctcttaatcacaaaataaataaataaaaaagaacagaacaaaaaacgcacacttatttaatcacattntataatcaacattgcacaaactcatacacgcgttatctcttatttcataggcacggtttttcattctctttctcaacacctttattccatctgtttcaagctttaactattatnattcgatggagttcacatattgtgattgtcaaacccaaaacatcatcacaacaccacccc

SEQ ID NO: 301563 - DNA, 373 bp, Glycine max
  unsure (1)..(373): unsure at all n locations
agcttgcttctacaatctcccctttttgatgatgacaaacctgaaatcaagaaacacatacacattctttttcctagtcgatcactcactntattctccatattctccccctttgtttttgagtttatgcttacttgaaattaagttaattacttatgtgagttcttgatttgattcctatttctctcccgctttggcatcaacaaaaagccaaagtgcgcaacaaatataaaacatacatacattactaatcattcacaagacattcattgaaaaaatctaaaccaatcatgaagcaagaaacatgaatagatcacatatataaaaaccacatagtcatataacataattcataattgctcaatcatactat

SEQ ID NO: 301564 - DNA, 419 bp, Glycine max
gcgggtctgggagacgaatgtcaagtggtttctatatgtgaagatgatgttccaagaactctggatttggtccgaccatgcccttctgatttccagctgggaaattggcgaatggaagaacgccccggcatttacgcaacgagcataatgtaaacctttacggttttaaaagctctatagttgggcctaggctttagagttttcattttgttaaggctttgtgtcttttgtttttgaatttataatacaaggatctttcttcatctgttcctagtctctacccattctcattcatttgcatgtttacttctttttctaaaacggcagattcgatgacgagtcccccgaaggtactaatacctgggacccgtctatcaacttcgagcaagaaatgaaccacacggaagatgaaagagatg

SEQ ID NO: 301565 - DNA, 213 bp, Glycine max
agcttgtagaatggcttttcatgatccatgcgacgatttcacggggttcaaggataaaatggacgacacccatcatctccatgacacacatgcacaaacgatgaccaggaaaatgtatgcaaaactggccatgcatgcacctatgcggacactcaacgctgagaaaattatggtcatgtgacgctcaggctcacgagtcgcttcctctatttt

SEQ ID NO: 301566 - DNA, 272 bp, Glycine max
agcttgatgtaagccatgtatgtgtttactggtacaggtctagctagcatggctaacatgaatggatgtcacggttgtggtttaattacttactatgattcgtgacgattcttcacaacgtcttatatgtggatggaaaataatcaatgaattgccatggctatttaacaccttaccagataaggaaccaacaaaagaaccatacttataagcatgtaactattatgacgtgttaaaaattgaagaacaatccacacttaaagatcacatct

SEQ ID NO: 301567 - DNA, 363 bp, Glycine max
  unsure (1)..(363): unsure at all n locations
tacgggactaattggaaccagcccaaaaagttttttgcaccttacgacccagcaagatacatttattgggactatattgatgcctggaccaatgtgttttggcatcaaaacaataaattcaagcattcgtggttgatctatttaaaaaataacactgtatacaatnttccaaactggtttctccaatggtggacttattgtggtccaatcccacaaatctttccagaagaagtccaacaaggatttcaacagttcaatagattgttaacaaccacgaatcaagaattccagccgatctaatgtattttactagctttgctttgtcatggatcttttcatggcaatacaggtatgggaaaactg

SEQ ID NO: 301568 - DNA, 352 bp, Glycine max
agcttggcttagcacattactatcaacaaagaattgtctaagtgacctgggctcaccgattcagcctcgcttatccacaggtagttcagcaagaggatgagtattcatcctcaaaggatgaactcgcttagcgcggtacgcacgcttatcgagttcttcagagaacgcctctatacaatgagaactgatgaactcacttagtgcagcatgctcgcctaccgagttcattgtgtcttccacacaacacagaaaacgcagctcgctctcttgcacttttcaaagctctaaaaggcgtattacacatgcactgtgtgcatcatactcaatacaatataccaacgcaaatagtcct

SEQ ID NO: 301569 - DNA, 319 bp, Glycine max
  unsure (1)..(319): unsure at all n locations
gaagcaacggnctttttggtatataaatcntgatgctttctacatccgctcatggaagagcgttgatagttgcctttatcaggcaataccaatacaatactaacatggctcctgacagaacccagctgcaaaatataagcaagagagagcatgagtcctttaaggagtacgcccaatggtggagggacttggcagcacaagtggcaccccctatggtggaaagagaaatgataactatgatagtggacacgttgccagtgttctactatgaaaagttggtgggttacatggcctctagcttcacagatttgatatttgc

SEQ ID NO: 301570 - DNA, 330 bp, Glycine max
gcacggtttatgaagaatgcgggagcttcttcggcgcagcaaaaggacgttcccccagtataatactcataccatgaagttcaccctatcgatgctccctctatttctatatgctttctaaaacttattatccctgcttaccatattcctcttcctctctaaaatctatcatccctgcttaccattctgctgctcctcctattcctataagactcctctaagccctactcagaaagaacaacgacctaatttgtgccggcatccaactttttcgcccttgaaggccttttgaatgttcattccatttgcccaatttcaatgtctgtccac

SEQ ID NO: 301571 - DNA, 159 bp, Glycine max
  unsure (1)..(159): unsure at all n locations
tacggaagcactcttttgaggttgttttcagctattgaanacatcccgtgcctacaatatgccaatcagatcatggttatgtatagaaaagacgcttccatgcctttgatgtacgcattacaaatgccttacttgatttgtatgccaagtgtggatgca

SEQ ID NO: 301572 - DNA, 459 bp, Glycine max
  unsure (1)..(459): unsure at all n locations
aggcgagcgccgtgacgcgttgaatgccgcatgtagacaatacgcttttgcganctcgcacacgcttatcctatagagtttatctttttgcatgcaattttcgaataaatcaggagacatgagaaggtaccgtaatgacgcataccatcacccacaatatccccatgatacacactgctaccattgatcatgaatggaactttaccactatccaatgcataatccgatctcagctcgcaaaacataatcccttaactatctcctaaccactatatccaactcaatttgctaagttcacgccatgctatggattaagccttctacatcgcatacactgaatcactcatactctccttcttaatcttctccccattccactaaccaaatcctatcattgcctttatgcaccccacccaacaactctctaagaaaaacgactatttgtcctgataacccccc

SEQ ID NO: 301573 - DNA, 228 bp, Glycine max
aaaactcatgtaaggatccctcgaccattatgaagagtctataagaccacactcacgactttaataacatcaacaaatatgacaagctttcatatattatttcgcacaggtgagctctttagcatttgaatgaacataccactgatctccttcgcagacccatctataccattggattcaaaccatgaaaacattttttcttaaacacacattcattatcatacccaa

SEQ ID NO: 301574 - DNA, 291 bp, Glycine max
atctttctgctttcttactccacatacaaccagatcaggatgcacactccacaccacgagaaaacgacattcactactaaagatgccaatttcttttacatggccatatccttcggccttaaaaatgccagtcctacataccaacgactgatggactgagtctttagacaatagatcggaccaaacatccacgtatatgtggacgacatggtcgtcaagtctaaaagcatagcccaacacgtggcagacctacaagaattctttggggaactctgcaaatatgacatgtgc

SEQ ID NO: 301575 - DNA, 196 bp, Glycine max
agttttaagcaaactcggatgacaataacgggggagtcggatgtccgattaacccaatttatactctgagacgctcacaatcgaatgcaggagctctcaccaaattccaatgacaataacttttcactcggatgtccgatcggaccccgcaatatacctagaagccccaaatcgaaaacagaagctctgagcaaat

SEQ ID NO: 301576 - DNA, 214 bp, Glycine max
agctttatgcttatgatcgcgcgattcttcggataaaggaaagagagacagcgaatgcatatttttcttgtagtctaaccataaccaacaaaatgaaggctcatggtggagtgaaacagtcattattgcaaagattctgagatcaatggtctcacaacttgattatgtggtatgctcaattgaagaatccaacaacttacacatgatgagtatc

SEQ ID NO: 301577 - DNA, 335 bp, Glycine max
atctttgcttgtagcttcaatggagaatgaagaagaagagaatggcaacgtgagggagagagagagagctgtctgaaaagtgtggggctgagtgaagagagagagagagttgctttttaattttaaaaaaaagctttttcctcatttcttattattttattataaactatgccacatgtctccatttgagtggagcaaaaagggcccactttccctttttgactgtgacccatactcagccacaaaagtgaggaaaatctgacctttgaaacgctaaaatcttgcctcggtttgcatgccgtttctatggttccagttcctcgcgtttctctgcg

SEQ ID NO: 301578 - DNA, 417 bp, Glycine max
tcatgcgcatatttccttacatacgtgctcttgttcattacatttaaccgaaaaagtgcacgcgtgttctattaatgcagcttcattacctacatcatttacacgtactgccaaggtgtatttgttacttacatcacacgcatctccttggctgaatttgcatacatgcatactcaaagcattttggggtaccaaaaattgcacatgtgcacatcttggtatttctaatacctatatatacacaaacttcatgatgaatcttgactatcttcacaaaaaggtgctacacttcatcccttttttcaagtttttgctacctaaagccgcatgcaaatttaagcatatttttcttgcggactaaaattgtattccaattaaaaagtatattttttgtaatatgttttcttcatgccacat

SEQ ID NO: 301579 - DNA, 207 bp, Glycine max
acccgccgaccccagagttacccgcagcatgccatttttccacgacgggtcccgaaagctgcgccatctacaaaccaaacacacttcatcccacacctaaccaacactcaaccagctcttacagcagaaagagtctctacgcgctcatttcgaacggcggaacgaaatgaaacggaacacactggagagaaacaaaacacaatacaa

SEQ ID NO: 301580 - DNA, 335 bp, Glycine max
  unsure (1)..(335): unsure at all n locations
ttaacaactatttcggacgtgcagtttatgttatgaaagccttcttttacggttctcanagcgtattagaggcttcttttcaatggctactagatgtaattaagtctttacagaactgagtgaatgaactgaccatattagaaaattacaggacacaagaaatacctccattattatcagttaatggtacaagagtcttcaagtgcacatgccgtgcatacaataatcaaaatcaagacaagcacaaaacatgcaaaaagtgcacaaacatataccatgaaaaaataacaatacaaaacccaataaaagcctgtcccgtgaataggtgttctcgc

SEQ ID NO: 301581 - DNA, 337 bp, Glycine max
  unsure (1)..(337): unsure at all n locations
agtttcacatagctgtcagctaaattaggagccatgaagaagtcaacatacccatctaacattttcagatgcccagcctanacccatgagaagggagaagaaagaaaaagggcatgttactgtattgaaatccatggagatattctaccagaagaagcatgtgtatcaactaattaatcacctgtatcccattacttagagcaccaccaaaaaggataagtattgaatcacatacaccactggaatcacggatgacaacagcattgaccttaactctctcacccaaaaccaaccaagggtaaggaatggtctggtaacgtgcattcactgaattctg

SEQ ID NO: 301582 - DNA, 375 bp, Glycine max
  unsure (1)..(375): unsure at all n locations
agcttctaccaatacccattcctacaacttattatgaagaggaaggggggatcgaagacacatatatggacatagaaatagagatgacaacacaaattttagaggcaataatgaccaattccaaggtaaaggcagaggaagggattttgaaaagtctagggtggagtgctatagatgtcattgtagaagcaaagcttcatggtgaatcaaaggtgattcaaaggtgttttgatgataacaatgatgataacaaaagatgatgacaaaggtgatgacaaaaagctcaaagatcaatcaaagaacaactcaagtgaatcaaagatcaatcaaagaacaactcaagtgaatcaagaacantncaagagtaagagtcaa

SEQ ID NO: 301583 - DNA, 316 bp, Glycine max
agcttgtagcatattgaaacctcaatatatcgagaagctcgacattgaaagaagaaactctgagcaaattgaaacgacaataacttttcatttggatgtccgattgagtaccgcaatatatcgagctgctcgatattggaaacataagctctgagcaaattcaaacgacaataactctttactcggatgtttgattgagtcctgtaatatatcgaggcactcgaaattgaaaatcaagctcgaagccaattcaaacaacaataagtttttactcggatgcttgattgagctccttaatattttgagacgcttgaaa

SEQ ID NO: 301584 - DNA, 481 bp, Glycine max
  unsure (1)..(481): unsure at all n locations
cgcgatttgtttgcncgttgctagnctgngacatttggtagattagcgaccaccgaattanacgatataactatttactcggatgtctctttttatcgggtaatatatcgagacgcgtggtattgataatagaagctctgaaccaattgaaatgacaattactttatacacggatgtcctggttgagtccgttatatatcgagacgctccatattgatacaaaacattttataaaattaaaccacgataactttttactttgatgcccgagatagtggcttaatttatccagagatggctcaaaatgagaacggaagctcggatcacattcaaacgacaattactttttacttggatttctgactgagtccccgtatatatcgagatgctaaaatttaaattccatagttctggaaaatttggattgacatgactttatacccggatggcctgttgagtccttgaatatatcgaaacaccc

SEQ ID NO: 301585 - DNA, 368 bp, Glycine max
  unsure (1)..(368): unsure at all n locations
agctttggctccatctatatctaaaataaaaacacggtgtgagtcttcttgcttcataagccacaacatagaaaggcctaaacacaagtcaaaacacataagactaacaaccaccgtgttatggtcatctatcggatctcacacgcatnctaaggtgtcatttttcactatctcaacatacatattgtggtcaactaccactagaactctcaaaactcagtggtcttccaacattctagtctggatgaatgctacgagtacaccttcatgacaatataatggcacggtcttacctattggctatgcctcacacttgtcgagatttccaagttgacactatggaaactcgaccacaaacttggtgccat

SEQ ID NO: 301586 - DNA, 381 bp, Glycine max
atttaaattcctaagatcatgagcatctatttgtgtcttactatgaaaagtggtcagataacaagcatagattcaaaaggtactaagttgcctcctaagagcgcttctttaacgtctttaactggacgcatgatggcttgtaagtcacggacctaacactttgcttacctttggctttggacttggtcgcctgctggtccgccatgtgtcgtatgcaatactcaaacctttttgtggatgagcagaggtgaactctaaagggggtggcggcgcgtctattgcccgctaccgaccatccccaggctgctgtggtgtttcgccctgcgcctgcctggagacgcaatactttttgatgaaagcatcattactagggggcctgat

SEQ ID NO: 301587 - DNA, 209 bp, Glycine max
agttttggctccacctttctctattttaagaacacaccgagagggttcttgcttcataacccacaacatacaaacgcctaaacaaaagacaacacacataacactaacaaccaccgtgttatggccatacatccgatctcatacgcataccaacgcgccattcttcactatctaaacatacatattgcggccaactacccctacaactc

SEQ ID NO: 301588 - DNA, 144 bp, Glycine max
taacgcccttagctggacgcgtgattgattgtatgtcacggacctacactgtgctaccttggcttggactggacgccagtgttcgggcaacgtgtgaatgctatactcggacctttttgtggatgagcagatgagaactctaaa

SEQ ID NO: 301589 - DNA, 286 bp, Glycine max
agtgttaaccatgccgttctacaaatcaaagaatacaactatggggttggacgaaggacctgcgacattggattttgttcttgaacccgaagtcagtgtcaaacggagtgtactacaaaatatctataaatgtgactgtaataatgaaagcaaacaagaatttgttcattttctttgcggagctcacttggaagttctctttgctgcgatagttatcttacgacctttacttttattatttcatacaagaccaaaagtcaaaatttccacactcatacaaccaccg

SEQ ID NO: 301590 - DNA, 373 bp, Glycine max
  unsure (1)..(373): unsure at all n locations
aagatttctctccatggtatgacactttgtttaacagttgggcgattgtcgacagtgtgcggttacgattattctaatctattagctcaacctccaactagcaacttgttcgtggcccgtgattctaagcacggacccactcttgncctttggccacgttgcagtccaatagaaatatcagatatagctaatttacattcgtatgaatataagatatagattaatataagccattagataacgatcgaatgagtaattacttcttgctaaagaatgccgaatggggcatcatgttttaagttactagcattcttcttcttgggagaatccatgtgaaaccaacaattataaaatacctataatattactctat

SEQ ID NO: 301591 - DNA, 230 bp, Glycine max
gactaatagcgcacacaatgcctgaacacactcctaaatgcctttacaggaccaagatccaccaatagaaaatgacaactacccatgcgctgaaggcctaaacgacgacacatgtatttgaaaattgggtgataactatcatgccatcatccattggtcgccacaaaataaaacattccaatctagtccatacgagacaccatatcttaatcatcaaattgtctacaaag

SEQ ID NO: 301592 - DNA, 345 bp, Glycine max
  unsure (1)..(345): unsure at all n locations
ctttgatgctggatcaggatgtcgctttatttttttaaattcgctatgaaattngtgttgttgagattctcatttctgcccgggggctggagtttggaggtatggatctatatttttctatcttaactttttcaaattactactatgtaattattatcaagtctatttttgttatgtttagtctgttaacaattaccataagcaattactgattttattccttatgatattgcgcatatgtaaatttgtctgggccccttgggtggagtaccctcaagcatagggcatttgggtctttctgacatatgatggaaaaagcgctgacttgactgatggatagggttg

SEQ ID NO: 301593 - DNA, 328 bp, Glycine max
agcttgccattaattgtacatctggtgtggaaaatattttctctttgggtgtcgtccagtggctgcatctgacttcacaagagccttctcaccattagcatatcaccctgcatagctttctcctcaagctcttcttccacctcttcttcttcactgatttcagattcactggtgatttctccatctgccttcatgatcatggctctcctggttggacagtcaaaagcaatatgtcctctgcctaagcatttgaagcattttatgtttctggtaccggtgttggatcatggcgtacaattatgcttagctctagctactgacattccat

SEQ ID NO: 301594 - DNA, 350 bp, Glycine max
  unsure (1)..(350): unsure at all n locations
agcttgtgcatccaataccctgatgaggatgtcccatatgttcttaaaactggactgattcatttgcttccaaagtttcatggccttgcacgtgaagacccgcacaaacatttgaaagaatttcacattgtctgctccaccatgaaacccccagatgtccaagaggatcacatatttctgaaggcttttcctcattcattagagggagtggcaaaggactggctgtattaccttgctccaaggtccatcacgagctgggatgaccttaagagagtattcttagaacnaatnttccctgctttcaggaccacaaccatcangaggatatctcacgtattacacaactcagt

SEQ ID NO: 301595 - DNA, 326 bp, Glycine max
ctttatatatatagaggcctgtgtcagctcgcatggaactttgaataactctatttcatcaaacataatcaccaaagagacattcctaaaacgcaaacagaaggtacatatggcataaaacctcagaatctgagctaaatgaatggcaattatattatagatgaatcctctgcaattgacactgattcactgaacaggaaacttaccttcatccctcttacactttccaatgtccacaagccccatggttggcccaatccctcccatagccacaagttcagtgaagtggtgattgcgatggccatcccctcccatagcgaaacagg

SEQ ID NO: 301596 - DNA, 316 bp, Glycine max
  unsure (1)..(316): unsure at all n locations
agtttatcaaggaagcgatctagtctatagggagaagcatgtataacactcgttgcaactttgatgaatgaaagtcttatgagatacacttcaaagttccacttctctccctcttttagtcccttaatttcgctctccccccttctctctttctttctctccattaaagcatcctctttaagcttcttatccatggaaattcttggtggtgaagcttcctcttncttggcttattccctagtggatggtgcctcccctctcctcttctccttttccttcgatgcatctcatggtgtaaaaccccactgaacacccc

SEQ ID NO: 301597 - DNA, 93 bp, Glycine max
gaaaagggaaggaccattcactacggaataagcccatgaagaacgagcttcccaccaacaattgccttggataacaagcttgaagaggatgct

SEQ ID NO: 301598 - DNA, 324 bp, Glycine max
  unsure (1)..(324): unsure at all n locations
agctttcttgttaaaactgccttgagaaaacgtccttgagaagctagagcttanctacacacacccctctaataactaagctcacctccttaagaagcttcctttagaagattcctaaagaagtcagagcttagttacactcacctctctaatagctaagctcacctccttgagatgagaagctagagcttatctacacancccctataatagctaagatcacccccatgccaaaatacatgacaatacaaaaaaagtccctactacaaagactactcaaaatgccgtacaatacaaggctaaaaccctatattactagactga

SEQ ID NO: 301599 - DNA, 364 bp, Glycine max
ctacatattttctatagtggtttgaaacctcagacaaagatggttcttgatgcctcaactagaggtactatgatgtctaagagcctaaaggaagcaattgtaatcattgactccattgcagcccatgattatcagagtcaccatggtaggactccaattcaaagaaaaggtataatgaaccttgatactcattatgcaattttaagtaacctttatcaactaaatagcttacaaaagttaagaataatttacctaagaattgtcttcaatccttcttattggactagacttagaccaaacatcattattgtaacagcatatttaaaccaatatttatctgttatccctcatttaaaataagttc

SEQ ID NO: 301600 - DNA, 302 bp, Glycine max
  unsure (1)..(302): unsure at all n locations
agcttatccttatggcctgcctgcggactggaccccccgtgccaccccggaagatctaagccaagcccttactttcgaggggcaactcccaccttatgaagactatcccgggcaagacgatggggaatgagatacccatcttggccccctgctncacctcaaagatccatccccgcatgaactaccccagccgaacatagtccactatatcccggcctcacccacacccgtaaaagaatctgtctccttcgcggaagataacggaaagattgacgcgcttgaagagaggttaagagcagtcg

SEQ ID NO: 301601 - DNA, 415 bp, Glycine max
  unsure (1)..(415): unsure at all n locations
aagagacaaatattccaactgacttagattagcatattctttntgaatgacaaacaatgcgcctaccagggaaggagagtctgctgatggaatctcccataaccataaatgagattttggatgttagcatttcgtttctaaatgaccatttagaggaaacactgggttcgacaaaaatagaagaaatccactcaaagtgtatcaatctcgcacaggtaagtgtttcatcctaattccgaaccatagatatgtcatgacttgactttgcaaattatttcctatcaaatcaaaaattacatgcgtgatcatggatcaatagggcttcccttgggaatgggttcttttggtggtctcttctttcggcttttgcgtgtatttggcttttgattctcctggctttttctttttctgttct

SEQ ID NO: 301602 - DNA, 331 bp, Glycine max
gtactgcagcttgcaagtttctctcgagctcgtcgatgacacaagcagcaagctgccaagcttctcttgagctcattgcgatcgtgggtgggacttgcggcttccaacaaaaccagtctaccaccgcaccgcgctgccatgtcgcatgtgttctggtctcgcgtcgtctggtctcgcatcgtctgaacagctccaacctcccgtgaatgaagaacagggacaaacaccaaatgaaagaaccaaaatccctaaagcacagcggaccagtgggcacacaatgatgtcgtatagtggaaaaaaatatctcaactgaactcgcgtgattcccgct

SEQ ID NO: 301603 - DNA, 293 bp, Glycine max
ctgtttcactcctatttattcatatgcatattggaaagcttatttcatcatgtacatatctgcattcaaaaggcattccagactatcatacattcatttaggaagacaatcattcacacattgctaagaatttcatgctccttatatttacctatgtatacacattattgccaggtggtttccacgctaccgttatgtaaacatcaaacattggggcaaacctaaatccagcaaaaactcttacaagcaaatcctaatttcatgtattcctaattctaaaaccaaatttggat

SEQ ID NO: 301604 - DNA, 304 bp, Glycine max
  unsure (1)..(304): unsure at all n locations
atcttgggtacactangaacacacaccctatcctgaaacctcaagactccatcagttcccactctaaaactactctctctccctgcaactatggactataattgggctgacaagaatgggtcagacttctgaccctcacggatcttgctcaagagttcgctggtgactctcaacatacccaacttaatgctactacaggtgatctcacatgccaaactcatgtctctaaactgctctaagaagcccaactctctaacatcaaaccagacatttgaaggatttcctacttacgcatcactactac

SEQ ID NO: 301605 - DNA, 331 bp, Glycine max
  unsure (1)..(331): unsure at all n locations
gataaatcaatgtgaatggacctcgttcatttacttattagcattgttggcgtttgggaccatactatttccaaatgtagacggcctagtggacttagcagtgatcgaagcctttcttgcttatcatcacagcaatgaaagcccgatcatcactatnttagccgatgcatatgatacgttcgacctgagatgcgaaaagagcagtgcaagaattgtctgttgtatgcctgctctttatgtgtggttggtctcccatgtttttcgtcatgaaggtaggcctgtctatcctctataaagtcatcacatgtgccctgaaagggaaaagcaaatt

SEQ ID NO: 301606 - DNA, 233 bp, Glycine max
  unsure (1)..(233): unsure at all n locations
tttttagccctcaatttttaaaatcataagttttcatccatgcattctttaaatacccaaactgaaattcctaaagctagcaatgtacggggcaaaaacttataattttaaggattaaattctggatatttaaaaaataaacaatacgaaaacctgacgagtagctactgaaattttccctttaaaaggtccacagatgaaaacttcnaattcacgactaacacaaacatgac

SEQ ID NO: 301607 - DNA, 355 bp, Glycine max
agctttttgtggggaatttatccgatctaggtgataacaaggctggtgactcgctaacagccaaggcaaattactaaagccaactttaattcttttcactttcattctatcaccaaatcaagagccattacagaagatgtgcactatcttgatagaattttctataacttggaattcagcttctcttaaataaattaaaattaaagatcttttgaattcatgaattgctattttcattattggctgcatatgttatgtataataatactttggattggtcagatttgcatttaatgctagttgctcaatggtgcgatattatctataatatagaattgttctgtaaagaaccatg

SEQ ID NO: 301608 - DNA, 74 bp, Glycine max
aattttttttttggaaaaccatgggtttttaaaaagttcccccacccaccaaattaattttaatttaataaata

SEQ ID NO: 301609 - DNA, 347 bp, Glycine max
  unsure (1)..(347): unsure at all n locations
agcttgcctcaaagaggtccaggaatgacaaggcagccgaaggaactagttccgctccggagtatgacagtcaccgctttaggagcgctgtacaccagcagcgcttcgaggccatcaagggatggtcgtttctccgggagcgacgcgtccagctcacggacgaccagtatactgatttccaggaggaaatacggcgccggcggtgggcatcactggttactnccatggccaagtttgatccacaaatagtccttgagttttatgccaatgcttggccaacggaggaaggcgtgcgtgacatgagatcctgngtaaggcgtcactggatcccgtttgatgccgaccta

SEQ ID NO: 301610 - DNA, 158 bp, Glycine max
  unsure (1)..(158): unsure at all n locations
tcttcaagaataaatagttcttcacattctaccataatatcatgtntactcactttgagttcatcataatctttgngtgcttgtgcgcattctctccaaagatcacatcttttttcttttttgatgaatatgtacgtcattaagttccttaatatcct

SEQ ID NO: 301611 - DNA, 356 bp, Glycine max
  unsure (1)..(356): unsure at all n locations
agctttgaaagtatattttgactaaatacactcaaaagggaccaaattgtgacaatatttgactaatagcattaatggtttcaatgctaatacgatatttttattttatatagaaatatagtattgtattagcatgagaaaacataaataaaattaagacaaagattaaaacaacttaaaaaagaaaaaatacagataatttaatttaataaattatgtgagctaataattaatgtttttttgtattgaataattagtttatatataataataaatttaattatatgatataagttggatcgggttgggttaaaaaaatataacttggtatccaacccgtatatgattangtctta

SEQ ID NO: 301612 - DNA, 413 bp, Glycine max
ttggagggtttggatgaatacctcaatgatgcattgaaccttgaatcgagttttgaagaccccccctaatttattttattgatattttattatttaatgatttgtagctgtcatgcgtgttggtcgttgttgtattactgagtgtttttcatgtgtgttttaatggaaaaagtgtgaagtatgaattgaaattgtataagtgtcaaaaagttgccctcatagattgaaatcttgaagtattactgagtgtttttgccacttcgataattcattttagggttgaatcgagacccaaaatttgtcttaatagtttcattgacatgaaaaatacaggaataaaaaattattttaaccaaaataacttatacacataacaatctaagtgccaaaaattacccttatgaattgaaatc

SEQ ID NO: 301613 - DNA, 345 bp, Glycine max
  unsure (1)..(345): unsure at all n locations
agcttttctctgtatacatggtccggaattgtggaatncaccgcactcctaagtccctctttgctccttgccttgttatgaacccagctcactatgcccttattttccccaaattctggttcagttggccttttcccagttactagttccatcaacaccactccaaagctgtacacatcactcttctcattcactttgtacgtgtagccatattctacaccaattcaaacaaaatccatacattaataagcatgattaaagatcgcaaattaacatacacaatacactacaactcatctcttatcaaaagacaggagctactactcaatgctaaccaggagcaat

SEQ ID NO: 301614 - DNA, 287 bp, Glycine max
gatcggccaataactggctagttaagtatgtgaaaaaattctttgcagtccaaagactaatgcccgggcttaaagttatttacaccagaaccataaggaaaagtttaattcaacaaagaaagaatataaaattacggggacaaaattcgcattgatggggaaatggaggtacccaattgaccaaatgttgaaggcaaagagagaaaatggaagaggacttactatcagctgcagaaatcttgagctgctcaagagcgggggcattatttggagcacccgatgatgca

SEQ ID NO: 301615 - DNA, 133 bp, Glycine max
ccatccttccccgcctggagctgaccctacgaaccagcggctcccctctctgctccgcaacccgagaaaccgcccatccggcccctcccgccctcgccagccctgggcctctccccctaatcgcgctccgccc

SEQ ID NO: 301616 - DNA, 220 bp, Glycine max
gttttttgtactatattaaaataggaagaaatataaatagtttggtttaaaatattgttatggactaaaaaaagtatggtttaaaaaaattatattttataattttttataaaattgacataatattttgatttaatcttaaataaaaacaatatattgaatgtagtgaattaaaataattttgttaaaagtaaaaaataaggatttttaatatggtttt

SEQ ID NO: 301617 - DNA, 287 bp, Glycine max
agcttgaaggcaaactggatgcattggtcaacttggtaacccatctggccttgaatcaaaaatttgtacctgtcgcaagggtttgtggtttgtgctcctctgctgaccaccatacagacctttgcccttccatgcagcaacctgcagcaattgagcagcctgaagcttatgctgcaaatatttacaatagacctcctcaacctcagcaacaaaatcaaccacagcagagcaattatgacctttccagcaacagatacaaccctggatggacgaatcaccctaacctc

SEQ ID NO: 301618 - DNA, 309 bp, Glycine max
  unsure (1)..(309): unsure at all n locations
atctccatcattgggggcgcacttgagttgtagatccctctacctttgggcgtaatttttgaaagattcatgttcccttttacacatgttctgtagctacattctatttggagccatatcaaaattgtactgatactgcctaataaaggaaaccattangtctttttaggaacggacccgggaagacttcagatngctgcaccaggtgatgggtgccctactaaactttcctagaagaaatgcatcacaatttctcatttttgcgcatgccccattttctacagtacatctcaagtgaattttgggcaa

SEQ ID NO: 301619 - DNA, 349 bp, Glycine max
  unsure (1)..(349): unsure at all n locations
agcttgtgcaaatcaaatcactcctacattgcatctctagcatgcattttctttctttacccactcctcacgtttggttttttagggaaaaacaccataactaaacgcgccgcaaggtatccctatcgcaccagatccaaatctagaacgatgggtgatcaagaggagacgcaggaacagatgaaagccgacatgtcggctctgaaagaacaaatggcctccatgatggaggccatgttaagtatgaagcagctcatagagaagaacgcggccaccgccgccgctgtcagttcggctgccgaagcagacccgactctcttgcaactacgcaccatnctccctcaacata

SEQ ID NO: 301620 - DNA, 330 bp, Glycine max
  unsure (1)..(330): unsure at all n locations
aatcttttggagggcccaagtgggcttggttgctatttgcatccccatttttactaaatacacccccctgcttttttttgtgattcttttttcgtaaagttacgaaaacttacgaatttcgtaacgatacttgttttctttccgtaatgttacggaaccttgcggatcacataatcatccccttcttgacttatggaatgttacggaacctcactaattgtgaaacgatgcttccatttgatctccagtgtggcacggaaccttacagattgtgcatcaatattntcttttgtttcccgcatgtcccggaatttacaaattcttaatgat

SEQ ID NO: 301621 - DNA, 308 bp, Glycine max
  unsure (1)..(308): unsure at all n locations
acctttgtgagttgaaacaaattgaacgggcctgaaagggtggccgaaacattaaatgggcatccaagaaattgttatgaaacatcttgaatgatgtcattcccatatattaagctttgcgagttggtcaaagaaaggaaaaacaattaaagacatagcttttaactattcaagagtangttgccatactctttgtcactattcgccaatcaactactactatatttacatccggtcatttccaacactccgtagacactattcataagaactctaagagtggtctaaaatccatttgctatctttct

SEQ ID NO: 301622 - DNA, 405 bp, Glycine max
cttaattatgtctcacttaaccactaaggcattttatttatgcttacaaggttgagattttatgtttcttttattttctaccaagtacataacaattgacttgtagcgatcctcaaggcttatcaaacatcattgattgtggttcctatcttgttcttcctttcacatttttttgtttccttgtttaattcccgcaatgctaattttgtaattctgtccgaatttcttattttcatatctctcattatacttaacctttttcggtgtttttttgtgcctacattgcgtttcataacgtcctctttcacctcgttttggaatcattccattctgtgtactgtacgctaaaaaacaaataaaagttaaaatgcatttatggctcaattggtgtgcgaattccattct

SEQ ID NO: 301623 - DNA, 331 bp, Glycine max
  unsure (1)..(331): unsure at all n locations
attatggcgcacccatcagatgtggtactacgtggcggtcgggcgatggtgcacaacaagttttccacatccacaaatcgcgcataaacacaccatcccctgttgcccacctccaactgagctcacgtactcccacgtagcccatatcctcgtttctctcaacaccgggtccccatcaatcctcccaagcttccccaacatgcaagtaattcaacattcaacagcacaaactatcacagccaagataacacggcaaaggcagaaaactctgccataacaccaaccacaatcacagtttttctcacttacagaccncactaacaattccttc

SEQ ID NO: 301624 - DNA, 472 bp, Glycine max
  unsure (1)..(472): unsure at all n locations
agccgccccgngttagctcgttgacantcgtttggatagcaacanacgcttgggctaagtggcttggttaaaataccctactttagtgtatttccnccttcgaaccgtgtggaagtgtgattggtttgccaaccgcctgactctttcttgaagggtgatcctaaaacaactacctactcgtgtaactctaagaaggaaggggattatcgtggacgatggtgggtgtgttcttttcggtgatgatcacgacgaatcacaacactcgttgatggggtgcaccttctcatacctggatctggcgcatcacctatcaattggtggtgtatatttgggcaagctagaatagtcccacatttcaatacatgcaacgcggtgtagtttgtcagcggaaacaggacgcataaaactgaccatcccatctcgtcctggttcgatcgactcttttgttaaacacgaactgtctacttttgcc

SEQ ID NO: 301625 - DNA, 318 bp, Glycine max
agcttggattgattcagtctaactagggatagaggtttactaatctacgctatacaatacaagacaaaagcatgattgatcagagaaacatctctatatacatcagcctggttgttacacagacctaacatctttacctactactgtcagtcttacggtttttagcctagacttagcttaactctgctctaaatcatcaattatcaatgtttctttcaacaatgccttatctctgaatttaaccctatctaagactacttccctgagttcgatactcggattcatccgctttaattttaaatacttgacgatccgatg

SEQ ID NO: 301626 - DNA, 395 bp, Glycine max
gttatcatgacaacgatacatggattacattatatcttgatgcaatgacatatcccatgtctgttatatccatccacttgtccacactaacctaaatcacaaaaacatacatgtgtcagtcatgtaaacattatttataaaaaaaggcataaacaacataccttggataacccatccacatgtagggacaacctcaactgttcaaatctctccgtgccaccaaagagctttatgtagtcttgtgaccatttgccatgttctttaatcaattcattgcgcatcagtgcccaagattcttctcccatatcgaacaaagcagcaagtgactgatatccacagttaccatctgctttcacatcaataatgtcctcaatgaaaccctgtataaatggtgc

SEQ ID NO: 301627 - DNA, 194 bp, Glycine max
gaatctttcctgtataatatagagcttgttataccctaatttcgtctggcgaccgttgattggtggaatgcaaccttcgcttcaccgcttctaggtacttaacacccgccgttaggcaatctgtgaagttccacgacatgtctgaagtcgaaaggaagcattgttgcacaatccgtatagttctgcaacattcc

SEQ ID NO: 301628 - DNA, 426 bp, Glycine max
  unsure (1)..(426): unsure at all n locations
gcgaacagggctattannctaancccgccttgaaatagccggctacgttggcaacgagacacggcactactttctagtccaaaaagtaagctagccgcgccacaacatagatgcgacaatatcccaagctccccgaaaagaggttaggacggtgatcgctcttaccccagaggcaccatgtggatggacggttgctctacccttgacgggagtccagaactttcccgaatggtagccaagggccaaagcgatgacagacacctactcccccccgaaaaatatacgggcttctcgctattgtaacgtatgatagactaaggcccacgtaatagaaatcgtagaaacttgttgacgctcaaacctgacaatatacttcttttgaataaatgagttgtccatgttctactcaaacctggcaatcaatct

SEQ ID NO: 301629 - DNA, 373 bp, Glycine max
  unsure (1)..(373): unsure at all n locations
aggtggcatgccctacttgcgctttaacgatcaaattgaaacctgcaaaatcagagtctacaaaggctgttagattcaaggaggtacctttgggataccacacacctacatcgggtgtacccatcaagtatttaatggtccttgaaacctgccaaatcagaggcttgaaagcctgttatatttaaagaggtacctttgggataccacaaacctacattggctgtacccttaaggtatttaatggtccttctaactgcttgttaatgagattccttacgattcgactgatatcttacacataagagaacacctagcatgatatccgatctacttgtagtacgtagagagtgatccaatctacctatatatttgn

SEQ ID NO: 301630 - DNA, 126 bp, Glycine max
acaaacattatgacctcctgcaaaatcaccctgatggagatcacctaattaatggctaccctcacacacaacgcgctgtcttcttcaaatgtctggccataacatcatcctcacaatcacacacac

SEQ ID NO: 301631 - DNA, 392 bp, Glycine max
  unsure (1)..(392): unsure at all n locations
agctttatgataaatgaaaccaaccttgtaacatgatgtattgcatttatttccatcattacatagcattttgaccaaaatttacattgcatattttgcatttaagccttagtcttaacttgttttcattgttttccccttcttttagaacttgttatgcgtgtcttttgttgttagcataagttttgggcttggaaacactcaagtcattggaagacatcaaggaatgtagccaagagtttttaaggtccaatgggtgaattgaaaacaatttgggagagtctggaacatctcatggcctatgagatccactgtttntaaacttgtaaatcttgtagagcatctcaaggtcgtgagttgcatctcacacatgtgaagtcgacagcataaca

SEQ ID NO: 301632 - DNA, 386 bp, Glycine max
  unsure (1)..(386): unsure at all n locations
agagcgtatcttanacncnctttatataactagaggacatttgcccttaatctattgcaggggttgctttttgtggactggcggggacttgccgagcgctctaaggttctcttcccctctgcgtataattaagagtcacgctttttgattgtttactgcctccatataattcttcgtaagtataatctagtcataaaatatttcaaaaatactgggatatatttaacatcaggcatgtgggacttattcaggtaacgtctttgagaaaaactatggtgttttattgaaagattttcaaggaagatggaatctacatgctaacgcttattgatttggttgagatccaatacatccacgtactaattgcctcgttgatacttaaatcg

SEQ ID NO: 301633 - DNA, 239 bp, Glycine max
ttccatcattacatagcattgtgaccaagatttacattgcatatattgcatttaggccttaatattaacttgtcttcattgtgttccccttctattagaactcgttatgcgtgtgttttgtggttaacatacgttttgggcttggaaacactctagccataggaagacatctaggaatgtatccaagagttttaaggaccaatgggtgaatggaaacaattgggagagactgaacatct

SEQ ID NO: 301634 - DNA, 355 bp, Glycine max
  unsure (1)..(355): unsure at all n locations
aaaagagagcaaaaagacaacaacaaaacaacagagaaaacccgggggannaaaggggcgactgacccnaanaaanaccgaaaaaggaacaaaccaaaggatgttaaaaaaggccccaccggggggagacaaacgaaacccaggaaaaaaggggaaaacaaaaggggaaaaagaaaggccgacaacacacgaaaaaagaaaaaggggaaacgggagaaactcaaaaactaaaaaaagcgaaagagacacagcaccaacaaagcacaaagacagctgacggaagagaaccaggcgaaacgaaaggcaaaagggaacgccagaccagaaaacgaagtaaaaagaaagcaacacgaaa

SEQ ID NO: 301635 - DNA, 302 bp, Glycine max
  unsure (1)..(302): unsure at all n locations
tcactaaagcggtgatccatctccacacatattttatcaatagcaacatanaaaatctctgcacggtaatgatgaagaatagtgatagtcctcccttctgctcttgaacgaccccgaactggtatttcgtcatccatatttggtaccagaatactnttagcaacacaaaatccttggacatcggcaaaaaaattattccagccactctctctcattgtgcccaaccgagctttgacaacatcaactaattccatggcattcacaatattaagatcttntctttgcaatatatttgaaagctc

SEQ ID NO: 301636 - DNA, 124 bp, Glycine max
tgaatatatatatatatgaaagctttttgtgaaatccttaagctttaaaagaagtaaccatgatagatggactctgttatcagttatgtgtataaggggacccaaacagaacacttgttacgat

SEQ ID NO: 301637 - DNA, 178 bp, Glycine max
  unsure (1)..(178): unsure at all n locations
taagtattaaatggcagcgtcaaggagatcaaaatacaacttattttcacaaattagcacatattatgcatgcagctaagaagatgtcagttcttcaaagtggggatgttatgatggaatcccaagaagctctggatgtgcttggctgtttctcgtatatntatgggagacaataact

SEQ ID NO: 301638 - DNA, 285 bp, Glycine max
  unsure (1)..(285): unsure at all n locations
ttttcttcatggaaacaatttttccaagcaaattcgatagagagagaagttcctaaggggttgaaccctttntcacttcacttctccccctatttatagacaaaaggcgcagaagacgacgttagtctctacgtgctatcatgctntgagtcttagagatagcanaagaaagtttaaaagtgcgggaccaaatggttcccgcatgtcatcgggcccgccgcctctggatgacanaaggcgcagaagaggacgttagtctctgcatgctatcatgctttgagtctt

SEQ ID NO: 301639 - DNA, 298 bp, Glycine max
  unsure (1)..(298): unsure at all n locations
tttcttgttagaggtaaaacttcaaaaccttgccattntttctttcatcttcttattcctttaacaaggttcattatgagtcttgatttaggcatgttcacgttggttttttgttacttggtgatatatgatttctatcaatacttctttgcatgtcattataactatcatatntagatagctntttcattacagaggcaatgtagttttggaacatcaattttaatggttcctcttgttgttgtcctatgttgtgtcancgtttaacgttagattaanaattaagcccaattatata

SEQ ID NO: 301640 - DNA, 273 bp, Glycine max
  unsure (1)..(273): unsure at all n locations
gggcctttccaagtggaaggccttggaggaaagaggtatccctatgttgttgtggatgatttctccagatttacctgggtcaactntatcagagagaaatcagacaccctttgagtattcaaagagttgagtctaagacttcaaagagaanaagactgtgtcatcaagagaattaggagtgaccatggcagagagtttgaaaacagcaagtntactgaattctgcacatctgaaggcatcactcatgangtctctgcaccatcacaccacaac

SEQ ID NO: 301641 - DNA, 277 bp, Glycine max
  unsure (1)..(277): unsure at all n locations
atgaagaaaaagtggagaagaacgttcttatacctgctcgactatctcaagaagaagctgaggaagaagatccaggtgaaccaccttcacctctaccataacaacaagatcaagaactagcatcaccagagtttactccaagacgagtaagatctttggtggacatgtatganacctgtaacttggtcatacttgaacctggaagctctgaagaagcgtcaaagcaggaagtatgggtcaagggcaatggagaagagatacanatgatcgagaaaaa

SEQ ID NO: 301642 - DNA, 398 bp, Glycine max
  unsure (1)..(398): unsure at all n locations
tgtctttttcaccaagagagtgccttggataagaagcttagagaggaaacttcaatggaggaagataatgagagagaganagtggcatgaaaaattgaaggaagaaagggagagaggttgaactttgaagtgtgtctcacaagactctcattcatcanagttgtgacaagtgttacacatgcttctatttatagcctangtcactaactaaatgaaattcacttgtctttcattntatgtgaaactaagaagaatattccaaggatatgtcanaggcatcttagcatattccaagaatatgccaaaggcatcttaatatattctctttagatgtcacaagaataaaaggtgtgactctagcacatggaaaaggaatatgtcacaagaatattctaaag

SEQ ID NO: 301643 - DNA, 192 bp, Glycine max
aagtggagaagaacgttcttatacctgctcgactatctcaagaagaagctgaggaagaagatccaggtgaaccaccttcacctctaccataacaacaagatcaagaactagcatcaccagagtttactccaagacgagtaagatctttggtggacatgtatgaaacctgtaacttggtcatacttgaacctg

SEQ ID NO: 301644 - DNA, 255 bp, Glycine max
ctcgtattgcatcaccattggtggaggtctaccaaaaactgcttgaaatggtgtcatacccaagctttggtggaaggaagtattataccaaaattgagcccaaggtagcatagtaacccaactcataggatgatcaaatacaaagcaccttagatacatctcaagggtcttattaagattctcagtcaggccattggattgagggtgatatgaagagctcatggccaatgttgtgccttgagctttgaataattg

SEQ ID NO: 301645 - DNA, 267 bp, Glycine max
  unsure (1)..(267): unsure at all n locations
cgcccgaccgccacctagtaccacatgtgatgggtaccccataatcctacaagcttgagatgaggaagtgttgaagggtgaaacttcctgctnttattgttgaccacagagtggtacctggagatatgtcgcgggggtcaggagaccttgnggacgtcaggtggggtgctattgcccaaaaccaagcttgaccaatcccgacccaacccgggcatagtcggtcagtgagaacctgtgatgtacctaaacaggcgagctcctggcagt

SEQ ID NO: 301646 - DNA, 384 bp, Glycine max
tactcagcttgtaaagaacttaggaaaatcaagaacaaacttgttcgctcatcgttcgcgtgtttgatatccactcgacaaggtttgaagtaaaggaaaccttcaatcctataacgcaacgtggcggacaaaagtgggcagttaacttgaatgacctttattgtcaatgcggaaggtattctgcgcttcactatccatgttcacacattattgcaacttgtggttacgtgagcatgaactactaccaatatatagatgttgtttacacgaatgagcacatcttataagcatactccgcacagtggtggcctcttgggaatgaagcggcaattcctccttctgatgaagcatggacactaatcccctgacccaactacaattcgt

SEQ ID NO: 301647 - DNA, 268 bp, Glycine max
  unsure (1)..(268): unsure at all n locations
tatccttatggcttgcctccggacttcactccccgtgctttcccggaagaattaagccaagcccctactttcgaggggcagctcccaccttatgacgactatctcgggcaagacgatgaggaaggagatacccatctcagtcccctgctccacctcanagattcgtccccccatgaactaccccaaccaaacatagtccgccatattccggcttcacccacacccgtaaaagaatctgttcccttcgtggaagataagggaaagattg

SEQ ID NO: 301648 - DNA, 469 bp, Glycine max
  unsure (1)..(469): unsure at all n locations
acactcacaagcnnaaggggtggctgtgtcacacgtatattaactggagatgtggggccccggttagagaaacaagtttttggtttaccttggaatccttaacctaagtggaggtggccacaggggatggtgggtttatgcgcgccttgtggatgaagaaagcctggtgtgcaccattcgccgaacggcacctaataacacatgtgatgggtaccccattattcttacagcctgaaatgaagaagtggtggagggttgaacctccttcttttattggtgaccacagaatggtaccttgagatatgtcgcgggggtcaggagacccttgggacgtcatgtggggtgctatttgccaaaccaacttgaccatcccgacccacccggcattagtcgtcatgaaacctgtgatgtacctagcggcgagctctgcngtcacagatnaaggatacagacccaagcaagatgctgg

SEQ ID NO: 301649 - DNA, 298 bp, Glycine max
  unsure (1)..(298): unsure at all n locations
tttgcatcaaaccaccgtgagtggagttccttctctcttcactcttctcttcacacccatacgttaaattgacttggttcattgtgggctgtagctgtctctcgacttgattcaagattggattcaccacacggaagcactgctgtgttcgggacaccactcagcatttctaagattgttccttaccaacctctccatggatagatggagctcanagtggtaattcctatcatttcccttctctgtgctctggtttttcatataataaagtgattcttgcttgatgaattctctaatc

SEQ ID NO: 301650 - DNA, 340 bp, Glycine max
  unsure (1)..(340): unsure at all n locations
agttaaaggctttangcncnnnttnatcnnnaacaaccggnggngccagtcataatcttgtattctaccactttatatggaggttcacattatgctaatgctttcattcatgagtaatttttagctcatgctagaaactcggcgtagtaactaccctacggatatcatcataagggataatatcttcttctgagaactactaaagtcacatatatatccatttaaaactatgctttgacctttcttgtgtagctggttcctatcaccccacaaattaaccgaatcaatagaaattatctatattttctctttcaaatggcctactatcccagaacaatgt

SEQ ID NO: 301651 - DNA, 330 bp, Glycine max
ctgcaagtctcacagctctatataaactacagtgtaactgaaaacagttgggaataatatcagaattcataaatctcacaaattctctctctctctctctctctctctctcgctatctttctctttttgattatccttgtctaatttggtatccagagccaaaaagatccttcgatggcagaatctcctcctcctccttctgctactcctttctcttcatcgtcagcgttctcgcacttgatttctgagaagctcgactgattgaacttcttgctgtgaaagcaacaagtagaaccagtgatcaaagcgcatcaactacaccgttacttg

SEQ ID NO: 301652 - DNA, 329 bp, Glycine max
  unsure (1)..(329): unsure at all n locations
gaanantgggtgtgctgatacanntntnnncnnngacaaccgggnntatatgggaattgttttttcnaaccctnaaaccggcgggttaaccgatccctggcctagaaaatttctaagagtacctactgaaccaagaaccgctgtgatacaacaaatggaaatcgccaaactgaaaatgcatgtttgtgccagtgaaaatactagaatcagtcaaaaggttaaaatagctcttaatccaaaggatcgatcctaatgactgagttactgcctgcacaagcaattaacttttaatcatgtgatatcataggactaaatacgagactgtatag

SEQ ID NO: 301653 - DNA, 367 bp, Glycine max
  unsure (1)..(367): unsure at all n locations
agcttatagtttgcaatagtgcttagggttctggttggaagttcttccttatggccgataattaacttgggtccctgtcttcatgatttttaagtccactgtgcaaagttgtttcaagtttggtctttggcaagtgcgtacaaagatattcatgacccgctgattaataggaaagattcatcacctataggatatgaggagactctnggtgtactgctaaatagctgatttcttaatatgatgcaaggctaactcaatgatgtctactccaatatcaatgatatacagtcttggaaattgtgggtttctgctctaaaaaattcagatattgaaagttctatttccttaatatcttggttctatagag

SEQ ID NO: 301654 - DNA, 475 bp, Glycine max
  unsure (1)..(475): unsure at all n locations
cggacgcgcgcgaggcaggggnnnnnnagggagtcttacgcttagancccccantntntnctnanncnncngtcctannatgagggannagnaggaggatgcnnaaatatcnttttgtacaaacacacgagacaccgtggtggggcgcctaggtgccagttttcctaggaaaatggcgttcacacaccttttcacacatgtttactgattaaaattataaaatcgttaataaatctcttaaactacctggcaattataaagaaatggtccaaaaaaaatattaaaaagtttgttcctataaatacagaataatctttgattattgacaaatgaggatagaaatcctgagttgaatttcttttttccaaatttaaaacaagcaagttgttgacctcaatgctttaatgggctaaggggtgtgggaaggaattaaaagatcttatgccaatacaagagggttgatttttcaaacatc

SEQ ID NO: 301655 - DNA, 499 bp, Glycine max
  unsure (1)..(499): unsure at all n locations
aggggtagctgngcttgtatatcacggcaattattctcnngaccngggatcctctagagnggacctgaaggattgcagcctatactanatctttcttaanccacacacacactgagcaagtagtcatattcagtccatacttccaatcgatcatgctcagtatgatgcatgcacctaacctcaactctcatatgcaatgtgttaccatccccaaaggatatagccctaagcgtgtccatatgacactctcacttangaaaactangcaagtagtgttgaggtcacccggtcgtgtacaggtaacttccccccccccacagtgatcagcctgaatctcaagggagttccaaaccgagtgacatgcccccaagtacaagtattccttctcatgagaaactgcaagtacttactggacaagtttatactatttccatgtcatatgaagtatgatacatgtggcaccatcaatgcactgaccaggataattaaatattctaag

SEQ ID NO: 301656 - DNA, 336 bp, Glycine max
  unsure (1)..(336): unsure at all n locations
agctggtatctagacncanaaatactagtgagaaaggggccacaatggggaagttttgttgtcaagggcaacattttccgttccagggccaaaccccctccctgtgcacctctttgactcagtctccactaccatatctcttctctacatggtcccataatctttagcttcacactcagcaacatattaacacacagcttacagcagcaacagaaagcgaactttgtacaacaccaaaccagtttcactagaccatacattctcatcattgtaacgtgacactcaattacggagtgatcatacccttggacgggactacaaacgcaaatattgctc

SEQ ID NO: 301657 - DNA, 500 bp, Glycine max
  unsure (1)..(500): unsure at all n locations
aaatacanncccccacnnnaagttccagctacaccgcaactaataaaacngccgnngggngannnggataatagaaatggtttttttttttttngngaataccttgatatgggagggggnagtgggtagaataaaatgaggatggttaggatataatgnaangnatttgtgggatgaatgaaattttggatgtgaanatttaaangatcggaatatataattaaatgtgatgggtattnatatttgtagaagatttagataaggaaaggttgaagggtgaagagtnctgntatgattgatgaggagaaagaggtggatggagatgtgaatagaggagtgngagaaatagaagangtgatgtgtggtgatattgaaaaaaaataatttgtataataaagaagggattgggtattattggaattagtaaaatgtgtgtatgtaataagtgattgtatggaatggaagattaatgtatatatagtangaagatggaagttgtg

SEQ ID NO: 301658 - DNA, 337 bp, Glycine max
  unsure (1)..(337): unsure at all n locations
ttctttttatgacttcttcgngctaaatgagtgtggctcgctaaccgactgcattgccctaaatgcctatggcgcgctgagcgagagtctccaaatcttcacttctcttcaagctttattctgagtttctgcaataaatataactccaaaacattataaattcatcaattaaaacacctactagacaaaaacttatatgatgccaaaatcctacttatttacacaaaaagaagcaataaaaagagggaaaatctgacaatctatattgactcaattacaggtatacttatgcacaacagttatcaaacacccccaaatttaaagcttcgttttccct

SEQ ID NO: 301659 - DNA, 158 bp, Glycine max
  unsure (1)..(158): unsure at all n locations
tttacaacctcagttcccttcccttatcaatcgatttcctcaaagcagtaagatatagatcgtttcaccctatttatccaaaataccanaaatggataagaaaggatcatatgttgagtgacagggtgagcaagggagggactaaaatgggagcccca

SEQ ID NO: 301660 - DNA, 273 bp, Glycine max
tcttaacttgattcttaatcccagggggtacaggacctatgaaattggtctgattagcccaaatcttaaaactttgtgaagttcataatgaagctgaaatttcaccattgatgtattagaggaaagacccaactttctagttagaagctttaaataatatgctgaccctatgctttcatatttctaaatcaagcatcacccaatatagaaaatctcttttgagatttattccaatatgaaaggttgactcatatagcattatcagcatatgaa

SEQ ID NO: 301661 - DNA, 461 bp, Glycine max
  unsure (1)..(461): unsure at all n locations
gcccnnnggggttctagcatganctgaatttgaaccagcccagataacntttcttgtgcctactttttatcnncncccttncacttggctctttttctgcacaaatttatagcttttcactggtgatgatcatgaaaggcttaacncctctatcaatcccaataatccacttccaagcaaggttgaaatctgagtattgggttaataatttccatttttcattaattatgaatatgcttaagactgaaaaaanaaatagggttaggattcctttcctaatttaaaacttaatcacaaattgtttgaatgatattcaaacctaaattgtaatctcaatgaatntaaggattaatctgattgaactaactctaatgacattgattgaactcttacatcttgatcattctctntagaatngtgataatttatctgcattggtctagtgaactaaaaatgatgag

SEQ ID NO: 301662 - DNA, 351 bp, Glycine max
  unsure (1)..(351): unsure at all n locations
agcttgtttctacactaatgctatactggatactagtataggttggaatcttattaatatgtatataacaatgttataccaaactctatatattctgttgtgttttgaataggtgtgtatgagaatgattttttagacatgtattgtgattctttagttgttcttcatttttctttcacataacagaccgttccgaacgaacataattatttggaatttgtatctctcatatttgattccatttgcctcaagtactanggcctgtgnnttgctgaaactaacataattgttttgtttgctgatatttttttggaggccattattgagacataattaattgaagcattttac

SEQ ID NO: 301663 - DNA, 456 bp, Glycine max
  unsure (1)..(456): unsure at all n locations
agccannnnnnaaggggngtcggacngacccgtactnctgcgacactatataaatactaagctcgtcatcgtgagacatcagaggctagtantttaataatgtgtgtanngaaaaatcaccaaatggatagagaaaaatctataatcatacatcttaggcaaataanggcttgctacccccaacaataatggctttttgattcatctttgacattgtgattttgaaaataaaaacccaaagttattaggcattttatcaacatacaactcccactgatctgcaaaagaaatatgagtaaaaatggaactgcgacaaaaacaataaagaagatgatttctcttatcattccagaaagaaaatgangaaccactgcaacaattttaattcctatggacatatacactatgaaattacagtaattaagttataaatgcgatgaattataaaagatttcn

SEQ ID NO: 301664 - DNA, 311 bp, Glycine max
gtttggtgttggcacattcccatcacaattattttctgttggattaagtggcctcagaataattaagaaaggggagttgaattaattatgaacgtgtcttgactaattaaaaaattatccttcttaatgttactagattcaattaggctttactactaaactatgagaaagtaaagaacagaaacgataacttagacaaaagtaaagcggagataaaaagtacacaacggatagataaagagtgtagggaagaagaagacacacatcatatttatactggttcggcctcaacccgtgccaacgtccaatct

SEQ ID NO: 301665 - DNA, 267 bp, Glycine max
  unsure (1)..(267): unsure at all n locations
ctagctactgaaatcacacatctaaagntttttcttgncatgaaaccaacatggcatgataatcataacatcttggagccatagttgacctaagtgaaatataaaaagcttcacacttaatgagtgacgactccactttgtgcaatctatgctatcgagtagcccacttatctaataaatttgttgtgcaaaggatatggccagattgcttgaagaactacaacaactatatcagggaggcatttcaacttagaagtggaacaaaaa

SEQ ID NO: 301666 - DNA, 373 bp, Glycine max
  unsure (1)..(373): unsure at all n locations
tgcttaatcaatactatgacaaattaatgatggctatctcttacaatcctactatggtaatatatgctgggaactagggaatcctacttttcaagtcttttttaaatgtatttatatgagaatttaacattaatattttaaaaaaaaattcaagactccataggaactacaagagaaaaaaatttcccgtgagaggaatcaagaacagggatggngagtgaggtagtattccccgccctgttgacatccctacattgaactaaagtgataaaaaaagtaagattataaataagagtacatttataaagatactntatactttgggtttcttatgttacacaactcataaagtatacacatatgttaaatgatg

SEQ ID NO: 301667 - DNA, 270 bp, Glycine max
agggggagaaccacctcaaatcgggcaataagattcagtccatactgctcgctactgcaacctattaggatatggggtctggttcttacattcacctgacaaaaggcatggccctgcgaaatcaattgatcaccccattccgcgtaaattccatactcgactgacatcatcctgctcatcttcatggtgatgccatgctcttcttgaaaaaatgaataagactacccaagaaagaaccttacggtctacgactcggcaactaatatggga

SEQ ID NO: 301668 - DNA, 198 bp, Glycine max
  unsure (1)..(198): unsure at all n locations
tgtatcgaaggacaatggatactattatgcgcagctgcagatcatgnngaaaggaaatngttggaccaacgttccaagtacagctcacttttagaggatcactaacactcgacaacatgatcgactaatcatgatgtatcgaactatgtactactgttacactatccatgcaactcagtacaagtcacgaaactatgt

SEQ ID NO: 301669 - DNA, 522 bp, Glycine max
  unsure (1)..(522): unsure at all n locations
aggggtacgtttgcatgagatacancgcgaattcattnactcgcnccccgaagcatcctctaggagtcgacctgcagagcttgcaagcctcttanccattcaagaataaaccagcgcattggtgatggactgtgaaaggtttgaaaaccttaactccttgaaagcgcttgaatgcaatcnaaacactttcagcaaaaaaagaaaatccatatctatgaaacttagggtcgataatnggaatgagaatgagaaaacggtttgagtacccgtatcgtgctgtttcttcggaaagacaaccagtgtgcgaagaaagataanggagnnggtggaattggtgcttgtggatgcgcctcggtggctccggaacgatgaagctcttgaagccgaagtggaggtggatgaacccttacgtttctttgatgattctaccatatgatnggagttttgcaaatggaatcggtganataaacgaaaatgaaaaagaagatattgcagtaccgagtcgattgatgagaaatgatn

SEQ ID NO: 301670 - DNA, 385 bp, Glycine max
  unsure (1)..(385): unsure at all n locations
agggatatacttgtgacnacggtaactataagctacaccacacttggatgccccttacttatttatttttttaggccttacctgggaataaacaacctatgctgatgtaccgaattgtgcaccaaagtaccccaaaggcaaagtaagcccatttgtctccaaaggtgatcctaggtggcaatgggccttatacaccttgataagccttttaatgataacccaaacatattttggcacccacttacaagatgggcctttttaacaactaacacttaaattgaataagtgtgcatttatctctcattggcatgatcactacaacttgacttctctgaactggctgatcaatatatgacacactgtgagagctctgcttcttgttacn

SEQ ID NO: 301671 - DNA, 440 bp, Glycine max
  unsure (1)..(440): unsure at all n locations
aggcaggtttgctgagatccccnnnnctttactcaacactacangggganggnaaggggggacatacttccccnnnnggccaacacaccccgagcggcggggggatatacgttcttcaacacggtccaatcnccgtcccaacaaattacgcatatgaaaaattggtcaattggataccaacaacgtggtcaaacccggcctcaatttacatattccggtgcgcggatcccccctgctttctcggctctctgataccctgaaaagaaacccaactaaatccgttgttcactattctccccggccggttattttcttgcttccggctgtctcattaaacgggcaaggcgatagcctcgtattcatgacaacgttatgcctgttagtgttccatgagtatttgacatccttatcatgttgcgttttataaactgcattatgca

SEQ ID NO: 301672 - DNA, 353 bp, Glycine max
  unsure (1)..(353): unsure at all n locations
agggggagaggtgaagtaaaaaagggttcacccccttaggcacttctctttctctctcgaaatagctgaggaaaattagttccgtgaagaaaatccaagccgaggtgcttccgtaacgtttccgtgagtaattatgcgaagattctcgaccgttcttcaagattcatcgtccgttcttcgttttcttcagtcttcaacgggtaagtacctcaaaccaagcttttcaattcattctatgtacccgtggtggtccacattntgtttcatgtatttttattcttgttntcatttactttntatacccactnttgacgtgcttaagccatttatntaagtcatttctcgcttaatct

SEQ ID NO: 301673 - DNA, 460 bp, Glycine max
  unsure (1)..(460): unsure at all n locations
cgggcacacgattttgattngctannntnnnaccccacncnnnnaacaaagcgggggnnnnanacagggagggngcacactccttttttttaaaananacgnncncncgggggggcgggagagaaacaaaccccccacaacccgggagggagccaaaaccacccgcgcggtacaaaaggacttccacaaccttgggggtgggccccgcctggaagaagggagcctcccctaccttcaagctcaaccctgggtcttcaaacgacaatcccagaaaaccacccctacacagaggatcacgtggccgaactaccatttacgcactcaagtaagggactctgaccctaaaagactgtcaaacgagaccttcaccctcgtgtgaatcccccattggagcccggtgctcagtattgcatggcgatattctgccaccaccactacctacatttaccatccatcaccn

SEQ ID NO: 301674 - DNA, 254 bp, Glycine max
  unsure (1)..(254): unsure at all n locations
tgttgccctaaattgacctgtaatccagttataaataagagtatacatgtgtgatactacacccaattacaataaaacctttctatacttataatatcgaaataatgcanatatggaaatgtgtaaagtttctaatgcgagaaatatgggattgactntattctttgtatccttaattaaatcctatcttgattataaaaataaggattacatgtgtgggtattacacacatcagaaaacacttcgttcacact

SEQ ID NO: 301675 - DNA, 401 bp, Glycine max
  unsure (1)..(401): unsure at all n locations
cggttgcgagtgagttctacatncatccagctgcgatctggcttgtggcaatgatcaatggttttttaaaggcaacgggcccagggtgggaaagcaaaaattgggcaataaaaagggagaaataagggaaaccctgcttaaaaggctttcttatcggttaatttccccaacccacattgtttaattcacaattacaacccttgtcctacctacacccatattcccaaaggccttcctattcaacacaaacttggttaccactttcatgatgaacacactttacaccaaccaaacatcaccaagaatgattttgatcgaaaagctgtgattcacccaaattcgtgtatatgctactgtcctattactgatatgcatgtagtataacctgcanggtctaactn

SEQ ID NO: 301676 - DNA, 413 bp, Glycine max
  unsure (1)..(413): unsure at all n locations
aggacgttaaagactgagactacagttncaatnctnccnacccacacaggtgaaggagaacgcagaccgttatgtcgcganntnngctggccttgtgacctaggtttgattacactctaaccacttaaaggtctgcttaatataggaatccaagggaaaaacaattaaataaggtaacaccacactatgaaacacattgcaacatataattaatatgtgaagtgactcttcttccatccataacaatggattgatagtgtaatctgactctagtttctctgaattgaatactaagtgcttgatcctatgtgatatatatatgagtgagcatgatgctactcactgtttaacctgaatttatcagggtgaaatacactaagacacatgagctgagatatggagtacactatctg

SEQ ID NO: 301677 - DNA, 349 bp, Glycine max
  unsure (1)..(349): unsure at all n locations
gcctcatattaaatgatgcatgattgattaatgatagaaatctataaggagacactttacttaaggaaccgagattcgagtacttctactcacattccttataggttgggggcatgtgtactgttcaatcctgggagccttcttttagaatcgcataaccgagtaatgtagaaattcacaaagagatgctccacttaaagatcaaggattgagtgatgcactcatatcaacttctcagcatgcttanaacttgaggggagggggggtggtatctgccctgcaggcccctaaaaaggagatcttgatctcaacttgatcgcattggacctggccccatacgagaccaccg

SEQ ID NO: 301678 - DNA, 197 bp, Glycine max
  unsure (1)..(197): unsure at all n locations
tttttaaaatatcccaattttttgcttaccactcaaccccaaaatccgagagactcaccatagcctccttctacatggaagggccagctttagcctggttccaatggctttcccgcaaccaccaactcacaacctgngctagttntctcgaagccattgaggctcgcttttctcacttcccatatgaagacccactg

SEQ ID NO: 301679 - DNA, 292 bp, Glycine max
  unsure (1)..(292): unsure at all n locations
ccttataccttattggaaaacccctggcgggtagattttcccatcctgctaagtgacacaacctgtgcaaataaactccattctatggtggatggagatgctgaagatgctatacacaatgcatctagatgtggggtccggaatccgtcctctaaccaacttagggtgcaaatgcccacgacgtttaaatgcgaccgacctcgtggtgttacaagatagacaacccttgcacctatcaagaccatgcgatgtccgttgacattatgacatacnaggttttatctatctggat

SEQ ID NO: 301680 - DNA, 244 bp, Glycine max
  unsure (1)..(244): unsure at all n locations
agcatttgtgaaattcaggacatgccgaaaaaaaaccaaaaaatattgatgcacaatcgtaagtttcgtcacacaccgaaatcaatggaacatcgtgcatattaaggaggtccgtacatccgtagtcaaaagggatgattatgtatcgcanggtcgtatattcngaagaaacagtatcgtacaaattctagtttcgtacttacaaaaaagatcccaaaaaagcagaggggtgtcttataaatgg

SEQ ID NO: 301681 - DNA, 450 bp, Glycine max
  unsure (1)..(450): unsure at all n locations
aggnagtcgtgtcctgtaanctacggcgttattanctcggccccgtcatcctttgagtcgacttgaggcatgcattctcttantttggctggnnagannaatgggctggggggtgggaatatatttaattttatcctcctaaataagtggctcaataaaatgtctaacctgatgtatttaccaaattttacctctccatgatggtttcttgtcctatcaacctctataacctcgggctaagttggtttatataatttgcttcttgagtaatctcatcggttccttaaaaatgcttacactattgagtaactccttgntgttagtcttgggatctattcatggtgttaattcttgtacgagtttaataactcttgtactttaattaaaccttttatgttatgcagagatgatatanaatgtggcaatcatgtttttttttgtcctttgtgg

SEQ ID NO: 301682 - DNA, 471 bp, Glycine max
  unsure (1)..(471): unsure at all n locations
cggggcaggttctnatgtacnctgngacacnttttnactcangctcactagactcgggttccccttaaaagaagngcgtttagttttgtngnnnnnnnngancnnnnngggggggggggaggcggaaaaangncgcaaaccaccaaggnnanaacgacggagaaacccacgctacgaccggcattcccatacagcgaagnancccacccacccaacaatggcagtacttagccaataacaacccttgttcttacctaccacccaattattcacgaaggccattcctatgtgcaacacaaagcttgtctagcgcacttccaatgatgaacaccaccttttgtcacaacccaaagctcaaccaagaaagaattttgctcgaaaagctcgtgaattaccccaaatttcggtgtctatgctacttgtccctatctactgaaatgcatggtggcataccccggcgggggctacccc

SEQ ID NO: 301683 - DNA, 217 bp, Glycine max
  unsure (1)..(217): unsure at all n locations
ttttaaagtaactctccaaaaataataattaattttggcaaaaatataaggatatacaatgtgaattaacatgattatttcatatttaaggtcagatttgaatcttnactatttgattanagatcaatatcactttctttaattattntatcatttaatccctgatatatatgtactatntaacccttactatataaaatttacttaagtctcattt

SEQ ID NO: 301684 - DNA, 108 bp, Glycine max
ccctatagatctgtccctctttggtttgtactattcactaggcctgattaggccccagcttttaagttagtaccctttcaaatttgcttctgcagctctttttctact

SEQ ID NO: 301685 - DNA, 467 bp, Glycine max
  unsure (1)..(467): unsure at all n locations
cggcatttaagctaagacnncnggatctactttactacctaccgangcggnnngggtagagacccttttgtttgnttnangaactctacacgacggagtctgttgcttgcacctgattaacagggctagataactatagtgctagacatagtgtgcacgcgtctagtttctatgatgatgatcttataaaggagtataaatgacgctaactacaacaagagacatctgcgaacggagcttaatgtaaattattccaaactcacgagacatcagtcgtggtattttttgtccttcacatataacacgtgaataatgtcatatagagaacaaccctagttgcatcaagtatcttcgtgggaggacgcaacgcttatacttatttgtattcgcattaaaatgttcatgttcactgtcctatgatgcaactaaatataccttcgtttcgaatcgtgatgctcaatcttttg

SEQ ID NO: 301686 - DNA, 236 bp, Glycine max
  unsure (1)..(236): unsure at all n locations
ataaagttaaagtttgatcttgctttagttcaaganaacgattttaatataagttagatgcatgaggtgactaatgtaagaaattattttaatcttggagagggttgtgttaggctttcgacagccaacgtaaaactntatcgaatctctatgacatggatcaattacgtaataatgtgaatgctaggtcgttgccccgaaaccaccgcgctgtatggctcgagtacagtgtcaaa

SEQ ID NO: 301687 - DNA, 473 bp, Glycine max
  unsure (1)..(473): unsure at all n locations
agggatgtttgggctgattacagcggnatnattctagtacccgagcttccttagagggacctgagggattgcatagctttggttattccgggaaccccctttagtgggacacccgtccaccctaaggcacccacccatagggaacctccccaagttccaactccgaacacgactcgaccgggcggtatttccacacgacaggaactttccctccgaggcctttgccggattcaccccgctccaatgacgtacgaagatcttctaccattcctcatcgccaatcatttggccgtggtaacttcccgaagggtnctcgaaccccctttcccgaagtggtatgaccctaatgcaacttgcaagtaccatgggggtgatccggngcattccgtcgaaaatgctggggcttantacaangatcacatttaatggatgctngatgctgactttcacaagatcggtcaatgtaggaccan

SEQ ID NO: 301688 - DNA, 449 bp, Glycine max
  unsure (1)..(449): unsure at all n locations
cggttgttccatgtctcacttattctcgcttcttaaatgtgctggnaagccatatggnntttttttcttgtgccagcctaccttattccgaaggtcggtttgatgttattctaaagcctttgatggatgatttggagaagttatggagtcgtgttttgacacatgatgtgttcagggagccaaatttgatgagggactttaatggactcccttactattgcatggtgtctgggtgtggaactcatgataaatttttttgtccgctttgatggagcataagaagttgttacattacaatatgagagggaaaagtgtcatttgactcgcattgtaggttcttaccagcattcattctttaggactaacaaaaaccttagaaaggggagaagatatgatagctccacctaggtgacacctatcagtgtgcatgagtaggaattgcaaaagtc

SEQ ID NO: 301689 - DNA, 200 bp, Glycine max
gctaaaattagggggtgaggtcctttttttaacatcaaatcatgtggagtggtggaatttgtgtggaccaaaaaaaagtgattgaatgtactttctcgaaactgttgataagctcaaaatattgaatttgtgtgaacatataattgctttctttgtgtttctgctatgatctctgctttggtatgtaaatccctaacatc

SEQ ID NO: 301690 - DNA, 340 bp, Glycine max
  unsure (1)..(340): unsure at all n locations
aggctgcttgctgtatcaggattatataacaggggacatggtatccgtaatataacattttccgtngacagcctaccctggggtgtcctaatgcatcttttttttttaccaccacaaaccagtctgggtggaatctggttgcaccaggaaaacagacataaaatgggagaacgagaaaaaaaggaaaccacaaaatgcgaacctacacctctacatatatgcctgcatatttgatcaatgtacactacacgttttcctattatttatgtctacctgctcactggattaatcggaatgtactacactactactgtgacgcacgcatgatacggatttgtgt

SEQ ID NO: 301691 - DNA, 376 bp, Glycine max
agcatattttagaaaaccttcctggagaacgctctgggagaaaccttcctggaaaacctaaacctaacctccacacaccccttatattagttaagctcacccccataccaaaatacatgaaaatataaaaaaaagtccctattacaatgactactcaaaatgccctgaaatacaaggctaaaaccttatactactagaatggccaaaatacaaggcccaaaagaagtaaaaaccaattctaacatttacaaagaagaatggatccaaccttgacccatgggctcaaaaatctaccctaaggttcatgagaaccctatggccttctttagtagctctagcccaagcctcttggagtcttctatccaatacccttggg

SEQ ID NO: 301692 - DNA, 437 bp, Glycine max
  unsure (1)..(437): unsure at all n locations
agggtcagtaagctgatatcgaacttantaattnagctaaccactccgaagggggnnttatctagggaaccagccatttcgganaacctggccaggcgggggggcttatcaacttgacacttcatttgggcagggctactaccccacacacaaatgacctcctccgaccggggataatctcctcgaacctataaacttactttacccgcagaaggctcaagccttgggggcttatttattggttattggtcaacaagtacatgtgtattgatcctgaactcctttcacacttaacccacaaatgacaaagcgggtncttttgaaaactattcccaaatgggtttttgtcataacctcggatggagttaatattgattaaccaccaggatttccccccacgaaaaagatatttatgggagtatttgagaagaaaccct

SEQ ID NO: 301693 - DNA, 294 bp, Glycine max
  unsure (1)..(294): unsure at all n locations
atttaggattccattttctagtaccgtggccaaaatgaactcctgcttccatcatctcttccaagattatgttccaatatctttntgtcatttatatttatccccacacttttctttcatttcanaatcganattctataaattttttgaaatgaaagaaagagacccggtatactgaaatagaaataagtgttccaaaggaaccttctcttctaccgaagattggcctttgataaatgatcnnggccatttttctatttaataattaatatgaatattctctttattatcttt

SEQ ID NO: 301694 - DNA, 431 bp, Glycine max
  unsure (1)..(431): unsure at all n locations
cggggacaggtttcagtagcctacgtgacacttacttantcaagcatgaccgggngngagangcttagaggaaacacttcctcnttgnnnncccncacgccggngaagcgggccagtatttatcttcctaacccaaaagccatgtggtcanggtactaatcgcctgccttggcagaatctattgtgggacattcaaggtgacacccaggttctccgcggatgtgattctagtgtgcattctctccctgttcaacagtttgcagttgcatgtcctccttcaaaattttgagagtatcctgactggtctatactcgggcgtctcctcactggagctcactgtcacctctacgtctgaatgaattgggaaggatttacaatgttgccgggtgcggcacattgcccgggggaggctaaggggcaagcacagcaac

SEQ ID NO: 301695 - DNA, 416 bp, Glycine max
  unsure (1)..(416): unsure at all n locations
agggtttgancttgttaccgcnntcaatctagcngtcactctgctgcgcctgtttaaataactttttatttttggaccagncaccttaggccccggatgggtgaattcagccttttctgaaatcatttttggtggggttggtggccaaggtggtcccctttgatgccgaaactgctttgggtgatagggagccttttggttactgggtgtgggtaaggagaggttgtcattgctgataatgacttgttgggtggcggaaactgctgtttagaatggaatcacacatgggttcttcctcttctcaccctcttcatttgccccagttnttttgcatttatcaaaacatgatgatccgatttgctcttttaaacccacttcgatcattttgcaggaatacccaatcacaaagcttgagg

SEQ ID NO: 301696 - DNA, 501 bp, Glycine max
  unsure (1)..(501): unsure at all n locations
ncgggatgtgccttttgctagngtatctgacactatccctactttactcaagctcgctctaatgtacattgatgtctgtatatatggacgtcgctnttgcaatnttgcttaaaagggagcgtccactggttaaacctacctttccaatggttttccttcccagaattggccttgaggaagcttgcctcaaagatgtgcaggagagaccaaggcggccgaaggaactagttccgccccggagtacgacagtcaccgctttatgagcgttgtacaccagcagcgcttcgaagccatcaagggatggtcgtttctccgggagcgacgcgtncagctcanggacgacgagtatactgatttccatgaggagatatggcgccggcggtgggcaccactggttactcccatggccaagtttgatccagaaatagtccttgagttntatgccaatgcgttggcaacagaggagggcgtgcgtgacatgagatcctgngttatgggtcn

SEQ ID NO: 301697 - DNA, 388 bp, Glycine max
  unsure (1)..(388): unsure at all n locations
ttgtttgtgaggatngatggggactcggtgttgagaggaacgaggataagggctacgtgggagtacgtgagctcagttggaggtgggcaacaggggatggtgggttatatgtgatttgtggatgtggagaatcgttttgcaccatcgcccgaccgccacctagtaccacatgtgatgggtaccccataatccgacaagcttgaaatgangaagtgtagaacggtgagacttcttgcttttattcgttgaccacagagtggtgcctggagatatgtcgcangggtcaggagaccttgnggacgtcatgtggngtgctattgcccataaccaagctttgacaatcccgacccaacccgggcatagtcagtcagtgagaacctgtgttgta

SEQ ID NO: 301698 - DNA, 245 bp, Glycine max
  unsure (1)..(245): unsure at all n locations
aaaacccttactggcattagcctaaaaacccttagccggcttaacctaaaaattagcactggaccgaggtggatccaaaaaacccctagctaccatcgactaaaaatagcctggctgatgtcngcaaaaaaaccttagtcgacgtcaaccgaaaatctgtagccgacattggctaaaatatcctagccaaggttgaccgaaaaatcactagctaatattgactaanaagtagctctaactaatgt

SEQ ID NO: 301699 - DNA, 434 bp, Glycine max
  unsure (1)..(434): unsure at all n locations
gctttcttgagtgatntattggacattaaaaggtgtttattgatttaaccgaaattggccccttcccaatggtngtaccttcattttgccttcacaacaccgacgacgacgaccactttaaaggtgacgaacccacggcccaccctacgatgtcaatgctgatagaaggagagtgacacttacaaatggaaaaggggcccaaaggttgatcgtgttcaagtgagtggaatgagacaaggcttgtagaagtaaaagggcactgattggatcctcacgtacgaaaaaaatngcaagttgtctgataaggatgagtgacattgttcttcngtctgaccaaggaatttaatttcaaatgtaaatacaataaaatttgatttgatacttaacataaatagatatctatatagatagataatttgaaacaaaatcaattn

SEQ ID NO: 301700 - DNA, 381 bp, Glycine max
  unsure (1)..(381): unsure at all n locations
atatatatatatatagatatgggtatatatatatatatatatatatatatatatatagaatataaccttcattatttttaggattttttttgggtaaaatgagaaaaagataaaaaccaaaactttcttaatacaactatgtgatgcgaaaaaacatctatagcaaaggagagaggaatatcacactcctcaatgcacacgaacataattttaaaaaangaatcagtcagatattagttgaagtgcatgatccaatttctatagcttgataatntcagtcttcaaaaaaagcccgaaacgaatcacatcacanatataatttcactccaaagctgataatttatttntatcattattttttggttagcatgctacatattn

SEQ ID NO: 301701 - DNA, 403 bp, Glycine max
  unsure (1)..(403): unsure at all n locations
cggggcgcgtagccctcgannncgtgaccttaatcactcagcttgacacgttggaagaagtttgatggttaaaatatattcttctcaaccttattccttaggccggattctttccttaaattcccctcggaaggttgcactttacttaaccacaggtgctgtccaaacctattgcaagaagggaatcggcactttaaataccttctgggaggccgtttatttcaaaactgctcggaccgtcgacaatggaatggtggataaccaaaaaattagtaaacccgtctaatgttgcttgtaacgtctgtttaaagaatattatgaccccttaccttccatggggtgtaaggaggccccattgtaaaaaaacccactcttggttttctgcctggagaaaaataaaaga

SEQ ID NO: 301702 - DNA, 214 bp, Glycine max
  unsure (1)..(214): unsure at all n locations
tccgtgataaaaaagtnttgattgtacttgatgatgtggatagttttgatcaattagataagttgtgtgaagcatgtaactatgtaggtccagatagtaaacttattataacaacaagagataggcatttgcttagaaaagagttggggacagacatgtctatgaggtcaaggcatggagctttgccgaatctctggagctnttttagttacat

SEQ ID NO: 301703 - DNA, 463 bp, Glycine max
  unsure (1)..(463): unsure at all n locations
aaaanatgatgcctagctnncctttgtatantcgngngacaatnattaannnagccttataccattaggngagatggactacatgatcatataggtctttggctcggttaagaccaaatttgggagatgtcttgtttatcttttaccattattcagaacctnttcaagttaacattattaaacttaaatagatggagggatgaaaaaattggagatttcaagttttaacttttgaagaccaagatgataaaatctatcttgagggtatatatataaggtttacctcgatcttaatgtgtttctcatctctcctctacatgcgatctgatgcacttctatctgttagccaataatgcttaactctcttctgtgacaacangcctcatgatatattcaacttgcaagtaagtgggagatagaccgaatagatgcctactgacttattttacattttatgcagcca

SEQ ID NO: 301704 - DNA, 341 bp, Glycine max
  unsure (1)..(341): unsure at all n locations
tcaactttgatcatttgaaaattaaatcttagatnncagagctctnttagagcacaaaaattcgtgctcttctcttcctctcccttcattcatctctttcttcctccaagctcttatccatggcctcctatggtggtgagcttcttctagactcatcttctcctcgaagtggcatctcctctctcttcattctcgattctgctgccattcatcttgcaagaagcaaaggaatccattgatgaagaagatcctatgcctacaagctccaatggagcttacatcatgggggacaaaggtatagtgcttttacaactctctcctccactacttgtatgaatatg

SEQ ID NO: 301705 - DNA, 491 bp, Glycine max
  unsure (1)..(491): unsure at all n locations
acgggggcggatgancccttgtannnccncnnnaatnaattttactcaagctaccangccatgggnttngaagttaattgataccatccttttctttggatttaaggaatatactatggatcagtgtatatatcggaaggtcagtgggagtaaggttatttttctaatcctgtatgtngaggatatatnactttgcaactaatgatcttggtcttcttcatgagactaagaagttttttctagtaactttgaaatgaagatactggtgaggcagctatgtgatagggatagaaatattctgaaatagatcacaaggattgtangcttgtctcanaaagcatatatcaataaagtactanagagaattaggatggaaaagtgctgaacatcaccccgtccgagttcagaaaaggagacannnattagcctcgcacaatgtcctacaaatgatctgggaatgaaaccaatggaaacaatttgtatgcatcatn

SEQ ID NO: 301706 - DNA, 437 bp, Glycine max
  unsure (1)..(437): unsure at all n locations
atgattcctacgnngagaggngcgcttggtgttcccttaagttttgtatttanaatggagcctaaattccattaaccaaaccactttgtgtgaatgtaggatgtgatttgcttctctaaaatttttatttggtattttggccaatggtaagtaataatttgggaagtctctcacctcatttccttccttaatcacccaacccaccctattacttccttgggttctcttanttattaaccaaaaaatcattattgatatttaacatgtcatgattgttatgctatacacataacatatgagctctttgatttttaattaatgactgagantaactaattaccccttagagtgaatngctcactacaaaggagctagatcttgtaggaattgaagcttaggtctatacacctgtnnttaattactntctgtattaacan

SEQ ID NO: 301707 - DNA, 337 bp, Glycine max
ctccaataaacctcctgaccttacagcaaaatcaacctcagcagtagaacaattatgacctctccagcaacagatacaatcccggatggaggaatcaccctaatcccagatggtctagccctcaacagcaacaacaacagcctgctccttccctccaaaatgctgctggtcccagtagaccatacattcctcttctaatgcaacaacaacaacaacaacgacagcatttactgagacaacaatccactattgaggcccctcctcaaccttcattggaagaatattgacgcaaatgacaatacagaacatgccagttcagcatgagactatagccctc

SEQ ID NO: 301708 - DNA, 476 bp, Glycine max
  unsure (1)..(476): unsure at all n locations
aggggtggtcganccttcagtacncncnnntnctattntaagccttgagcacacacaacgagnanaacctgtgaagccgacggttcgttgactcccgncacataacaaaacgcggaattgaatgtgaactctacccattcaaacgacataacttttactggatgtctaatgagccccaatattcgaacgctcaaattgaaggtgaacttctagcaaatcaaacgcccatattcttttactccgatgtctgattgaggcccgtcatatatcgagacacctcgaaaattgaatgttgaacatctgaatgaattcaaacgacaataaccttttactcagatgtctgatatagtctcgtaatatatcgagatgctccaaattgaatgttgaagctctgagctaatttaaacgacaacaactttttacacggatgtctgattgagtcctgtcatatatcgagatgctccgaattgaatgtt

SEQ ID NO: 301709 - DNA, 277 bp, Glycine max
tgcttgcactcgctattcctgactttgacaattaactctgaatatttactatcaattctaagatgttacagaataaaataaagatgttcggcgagatttatattaaaatatctaagaaatgtattgtatcttctaaaatgtgataaatattcaaagtcaggaacctcgtattttggttcatgttctgtaccaaacaaatttatattttgttatgacctaagttgatatttaataaactcttctgcacatatagattctattattattaaagttcata

SEQ ID NO: 301710 - DNA, 422 bp, Glycine max
  unsure (1)..(422): unsure at all n locations
cgaagttgacttaaacnnntttatcttacgnagaaccnggggnngagtggggaggttatttttgggnaggagcccggggcgggtgtaggaaggaaaacaaaacccccaganacccccagggaagaaatagggtggctgctattcatacttatgatccactgctatattccttaattccacgatgttccaagggaaatgcttgattgggccaagcgtttccacataattttgtggatttgttccgggcttttgtaccttcattaagattctcgagtgatgtatatccttagagatctaatagcagttattgtttactagacgacactttgattccaaaattttagattatggagtgcttaaactttcggaggagagaatattgaaggaaacaccaccagaatagttggtacatattaattgtn

SEQ ID NO: 301711 - DNA, 280 bp, Glycine max
ctactgctctaagccaggcaccacctcgtgctggtatcaaggtattgacttttttaagcttatgctcatatttaactacattgtggttatgcttaagattctgtgacatgaaactctgacttccttttaacatccatttggtttggttatatagataattttgcaccgtgtaatttaccacctcttggaagacataggatatttgataatagagagggcccctgtgacttctgaaacgcacgttgctgggcaagcagaagtgctgaatatctttgaaatc

SEQ ID NO: 301712 - DNA, 239 bp, Glycine max
  unsure (1)..(239): unsure at all n locations
gcgaaagagtatctagcgaatactacccacagggggaaaagaaccttacncaaaaaaaagggggagggaagcaccccaccgcccgaaaacgaccacacccaaaagagggcaaggccagcacaagcaggcgcaaacgacacacacaaaaaacgcggaagccaggcacacacgacggaaaacaacacaccaaaaaagcggacgcaaaaccaacaccggaaacgacccaacggaacgcagag

SEQ ID NO: 301713 - DNA, 539 bp, Glycine max
  unsure (1)..(539): unsure at all n locations
nnnnccataaggggaagggatangccgnnannntnntngnngacnnntntactnnnannncnnngcngnagtacnnannagngnngangagnngcactagcgatgagagaanactctacgctcnnntggnannnnnnnnnnaannacggaaaggngcggggagtgtttcaagaggaaacggcccacccaaccccccgaccacaaatnggcgcacaggaaacaggaaatccacgcgggcgggaccatccaacaccaagacagcaatggcacatggaccattgacattggaggacccaaccacncaaaaggacatcggacccgtggaatgggcagcatgaactcacaacaactaccctttgggggagattaccaagaggctaatcactactgtgccacctgctagacgcttgaaccacaacaaatacgccagctttatgacgttaaaaagcgctcctggaggcacctatatttatgaccctacttgtaaaattatctcctcgctgattcaactcggttataaaaattattcgttaatctat

SEQ ID NO: 301714 - DNA, 460 bp, Glycine max
  unsure (1)..(460): unsure at all n locations
aggaaagctgtggctgattaccngnnataattatcgccggagacaattggaggnacctgagagatgacccattttttannnnaccgcccgaaaaggggggactcaacaaactcccacaaaaattaatggcgttagaatggcctcaaaaatagaacattcaatttcgagcgtctccattattacgggactcattacacatccgagtaacaaagctattgtcttttgaattagcttagagctttcaacaatcaatttccagcgtctcgttatataacgggactcaatcagacatccgagtaaaaagtcattggcgactgaataggctcagagcttccacattcaatttctagcgtgacaatatgtgacgggcctcaatcagacatccgagtaaaaagctattgacgttagaattgctcagagcttacacatcaaatgtcgacgactcgattatgacaagaag

SEQ ID NO: 301715 - DNA, 405 bp, Glycine max
  unsure (1)..(405): unsure at all n locations
aggaggcgaatctgtaagcacaanntcaccaccagcgcacccangaggngantgggacgcgaaaattgctcgaacgnngacccgaccaacgggggggaggagagcaagcccaccccgacggggaaaacacaccagacagaagacagacgccgcgcacgagaagacgacccagccagaaaacgccacaacaaccgaaaggaaaaaaagaacccaannnccccaaaggcgagaaccgagcggacccaccccccggaccacggaaagccacccgggccaggagccngacccgaacaaagcacccacagagaaacaaacgccggaaagcggacaacccagaggaaacccaacaaaaacgccgacccccgacaccccagacgccgccccggagacaaacgacgaaaagcc

SEQ ID NO: 301716 - DNA, 363 bp, Glycine max
  unsure (1)..(363): unsure at all n locations
atttttatctcttgttccatcaaagcaaacacatgaataatcttcctattaagagcatacacttctatattggtcttgcctaggtgatacatcaattgaaaattatagtctttcataaactccatgtaacatatttgtcttatgtacaaacaaatacttccaactcatgagatcagtgaacacatcaacctttgcttcagaaggataatgtcttcatattttcaaaacaaatatcatcacaacaattctagatcatgtgtaggttagtgtctctcacacatcttcaactatcaagatgcatatgctataaccttcctatgttacacaccaatatgcaactcanaccttgataagagacatcat

SEQ ID NO: 301717 - DNA, 358 bp, Glycine max
  unsure (1)..(358): unsure at all n locations
aggttacgtaccttagacncggaacattactcanctcaatccganggggangggaaactctgttttcttttcncnaangtcctggagattgtggtgggtcagaaccctcggactaagcggggctattgccaaccagcttgccaatccaccacccggctaacgacggagaacctgaagtcctaacagcgactctgcaccacaataaagaaacagacccaacacgtgctgtgtggtggcactggaataggaaaagagatgggctcggtatgataccaagtggaatcatacagctaaatgagaagagccaatgcttgaattatacccagggtaacatacgctgaacaatcagaccacgggg

SEQ ID NO: 301718 - DNA, 367 bp, Glycine max
  unsure (1)..(367): unsure at all n locations
ggaatannccggcgtcatcttatgcgnaantatatacccctcacaggcggggcacgaagacaacttcctcaanngaaacncnggccggggagggaagagancannggacccaccccnccaccaacgnngagcgcgaaccacaacgagaacaagagagagacnaccgcccacggaaaaaaaccancaagannaggaaggaagaggggccaccaacagacgggaaagaaggccacaacgaagaccaaggcaaaaacaaccggaagaaaaagcaccccacaagngacagacaaagaagaaaccgcccacagcaagagacaaagcaccacaaacccacaacagaccgacaaccggccaaaaggaaaccacc

SEQ ID NO: 301719 - DNA, 371 bp, Glycine max
tatcattttttcttatacaaaaatgaagctgggaggccacttgttaaacaagtggccacaaatatcttaagaaggggggttgaattaacatattgcaaactatttccccaattaaaattttattttaattctaatgcaagttacaagttcccttaaaaatgaactcttaaataatgattcaaataaaacaatctgaatataaatgcacaacaataataaataaaagattttaagggaagagaaagtgaaaactcagatttatactggttcggccacaccattgtgcctatgtctagttcctaagcaacccgcttgagagtttcactatcttgtaaaatccctatacaagttttgaacacacaaggacaatc

SEQ ID NO: 301720 - DNA, 252 bp, Glycine max
  unsure (1)..(252): unsure at all n locations
ctaataagggaaatctatttttttttaaaatatataaccttttttgttcgaataaaacaagaaaatatccattttcaacaaaaatgaatttccatagcttcagcnttgtagtaaactagagcagtgagcccgcactctgcangacagcagaaacaaaacatgaccccatttctttgaaatgcaaaaagaanaaaaaatgcaacagtttttggcacatgtaacctttgagctntgaccggagaaatacttaat

SEQ ID NO: 301721 - DNA, 367 bp, Glycine max
  unsure (1)..(367): unsure at all n locations
actaaacctggggctgaggacaagtttaaatatatcgaatctttaattaatgccaaatgtttgactgatctctaattangcatgatatttcatgtctatgcttttgattgagcgaaatccatgcttgggtgctaaatattagaaaaatttgatgtacctcgtgtttgcttaactaaattgagtgttgttgccaattcctaatacatgctcattaatggtgattattgttttaccatttaaaatttatgtcgttcatgtatatcttttctttctccattgctctactatataaacacgtgtgagtatacaactaatcacaccactcaaatctctctcattttactctctcctcttgctctctgaactt

SEQ ID NO: 301722 - DNA, 489 bp, Glycine max
  unsure (1)..(489): unsure at all n locations
aggggccggttagccccgtanagcnancgnnaattatnatctangctgtcgcatcnaaanccggagaggtagtgcatatgttctcttactgnactaanccatnngcggcccaggtttcatggtctggtgaagatcctcataagcatctaagggagtcccatattggttgttccaccatgaacccccctgatgtccaagaagatcatcatctttctaaaggcttttcctcattctctagagggagtggccaaagattggctctactaccttgctcccaggtccattttcagctgngatgaccttaagagggtgttcttggagaaattcttccgtgcatctagaaccactggcatcagaaaagacatttcatgcatcatgcaacttaatgggagaaagcttgtttgagttatgggaaagattcaaaanatttgtgcaacctgacctcaccaccatattctggcaactcctcttcatattctatagggactn

SEQ ID NO: 301723 - DNA, 394 bp, Glycine max
  unsure (1)..(394): unsure at all n locations
gggagaatgtgaatgtatgtatacatgattctgatgatgtcaaagaagaatcaaacaaggctgcttcaaatgataagcatttgcttcaagaataattcaagagtgcttcaacaagcacagccatgttttaagattcactanagaccaagccttgccttaaaacaaagtgctttcaagacatgcaaggctctggtaatcgattaccaggaagtgtaatcgattaccagaagacagggttgagaaatagctgttgaaaaatgttttgaatttgaattntcaacatgtaatatattaccatatgtctgtaatcgattaccagcaacgaaactttggaaattcannattcaaagtcataacccttcaaattataactgtgtaatcgactacacaaaca

SEQ ID NO: 301724 - DNA, 311 bp, Glycine max
  unsure (1)..(311): unsure at all n locations
cctccgattaacaggaccttcatagatttgatcngatgccaaggtaggcacaacaacaggggcaagcacagtagcatgcgcaggaacaccagtagcagccagacgcaaatgcatttgtgccacctctacgacaaccaccatctctgctcacatgcggatgatagagctccagatgcacgcatatatgcaacatgtggccgaccagcaggcggccaaacataaggtttaggtgcaactgaatgaaagctnttacctgtacaccctgcatcagtagcgctaggaccccaatccttacccatggcctactcccg

SEQ ID NO: 301725 - DNA, 283 bp, Glycine max
atctaaaaacctcgccaaaggacggtcattctccttcttggaaggtaccacaggatatggtacttccacaacttcattcacaactttttcacttctactcttctttgcattctcatttttttcatctttttcaatcttctattttctttttcttgggcattcaatcattttttcttgaccattattagattctctctttcctgagttctctcaccttgctcatcatttttcttgttatcaatacctctcttttcaatgcggtaagccacatgactaagaaaaa

SEQ ID NO: 301726 - DNA, 475 bp, Glycine max
  unsure (1)..(475): unsure at all n locations
aaaacatcggttgngactgancgacgtgacngttanaatatttttncttgntgntnctactaggggaggcgtttccgatattgaagatattttcttttaaaaanggatgccngganaccttggagagccagggaaaagaagtcttgttgagggaccttaaggacacaagaggctagaaatcaaactctctagggttccacttggtatggatttgaacctaacttcagaattgtcaaagggcttcagggagagggcaaaaaaaaaaggtctatagaactttatgggtattggnttgtattntataggtaccaaatgattaactaccattcttacattattaaattgttttcactatagaaatcaattgctaagtgcaaccgtggagagcaattctattgacccanatgttgttgcagtgctacactcattttgtcagctgaaacactgatcccattctcatgtgatagacatacan

SEQ ID NO: 301727 - DNA, 292 bp, Glycine max
aaacctccggggcagcaaacccaacatgagcacaataatatgacctttcaagcaatagatacaatccaggttggaggaatcatccaaatatgagatggacaagtcctccacaacaacaacagcctgcccctctatttcagaatgctgctggtccaagcaagtcatatgttcctcctccaatgcagcaacagcagcaacagtcacaacaaagacaacaagcaactgaggctcctcctcaaccttccatagaagaattagtaaggcatatgaccattcagaatatgcaatttca

SEQ ID NO: 301728 - DNA, 469 bp, Glycine max
  unsure (1)..(469): unsure at all n locations
aggttacgtatgcttgtacctggaaataaaataccgcctgccganagtgacatgtaagaatccacggtcccttctttttatttcccttatangagagtcgagtagagttcactggccgtcacttaacaacgtcgtgactgggaaaaccctggcggtacccaacctaattcgcctgcaagacattccccttttaccaagctgcctaataaccaaagggcccccaccagatcgcctttcccacaagtgccacagcctgatggcgaaatgcgcctgatgccgattttctgcttacgcatctgtgcggtatttcacaccgcatatggcgcactctcaagacaatctgctctgatgccgcatagttaagccaagccccgacacccgccaacacccgctgacgcgaacccntagaggacgcttgaatatatgtcatgcttggacacatagagggttgcggaaagatacctgtgac

SEQ ID NO: 301729 - DNA, 347 bp, Glycine max
  unsure (1)..(347): unsure at all n locations
agctgttgagattaaaanngcctaaancatttccggagatgcatgtgaattaggaagcatcaacaagaatcaagccaaggctattgtgcaaggaatcaatggggcaaaacacaccaaaagattatgatgatggatggctcaaattctcacaaacgttaacttatcactttcaaattgagctttcaaaactctcatgacatgtagaagaaaaacaaagatttcaaatcacaaaatgtcaagagacttttattatcaaaacaattacccatttcttgaacatatcctataatttaaagaaaaatatgcaaagttgtacatgcaaacaaaaatgacctcaaatattaaac

SEQ ID NO: 301730 - DNA, 367 bp, Glycine max
  unsure (1)..(367): unsure at all n locations
acgagtatactagatcgccatataaaaacgcggccaaaacaggcgggaagaaaaccgttttctctaggccngaacccagggcgggggaagtcanaaaaaccccactccgaccagacaggcagtacgggagacgcggccatactacaaggcgcaaaacgagacgcatcgggcaatggggcaaaacaaaaagctcacccgtggagatgagcgagtactgagacagggcaccgcataactatccccgcgtgtaagcgacaacaaaattcatgcaacagtcccatagaaaaattctcagcacagtgagacgtgacaatcctgtcaaacaggccaaacgacgacttacaactctcgtgacgacacattaaag

SEQ ID NO: 301731 - DNA, 483 bp, Glycine max
  unsure (1)..(483): unsure at all n locations
agggttgctcngcatgatanctagngcgatatactagctcggcacccgagatcctatagagtgcacctgaaggcgtgcaagctcctataaaggctcccccaaaacgctnccgcgaggctcctgtaggaagctttcctccaaggctactttgagaagctaatatctaatctaccctggcccctctattacctaattaaatctccttgaaagtagtgccagataatataacacgataacttattccaacttcanatataattactaacatatatgtatatatatatatatcagggtgttacattgaccaaactcgctagagatgtcatcacccaccacaaataacaccgaagtcgtgatcataagcatggagactcanatagagcatggctcttctcactgcatctttaggatacctatgctagtcgaagacacatcgagagcgaagaggacgagtatcataaactagaccgtgataacacttag

SEQ ID NO: 301732 - DNA, 107 bp, Glycine max
actgtgaaaaggttttgattgtagtatacatgtatcattaccattgttgtatcgatccacacagacattgaatcaatcatatctaccctcaatatactgtgtatcat

SEQ ID NO: 301733 - DNA, 277 bp, Glycine max
ggttgttatattgaaggttgcctcttagcccatatcatatcttttgtgcatcatgcatcatcatgagaaagtgagacgaaaatgtctcagttagaacacttcttcagaaggaaaactctttgttgaatcgatacggcttatcataatcgttacacagttgttgagattgatagtatgctcgatcgttaatcatacaactatcgatcgatacagattgtttgaacatgactattatcaaaatcctatttatcgaacctggaatatcatcctccttcat

SEQ ID NO: 301734 - DNA, 461 bp, Glycine max
  unsure (1)..(461): unsure at all n locations
cgttnacaccacagggaanaagggtgaatgaccgttagacnacnatatatatnanccnnacaacangggagggggaagaaaagcggganactttctttattaaggagnnngggccnccggaggaagcgttcctaactaagaaatatttcttctcactaactcatgaggatgcatgatgcaccanagatgatatggactaagaagcaatattcaatataacaatcaatacaaatgtcactcaagggagttaggcatgtaaaaaaaaaacaatctcagcttttctcaagcttcagattagtctcatgttgtcatgttgtcccctatttcacaatttttcccagacaaaatctctaataaggaacaatattgatgcatggccacaaactaacataatgcaacaaagtatatttgatagacacacgtgacattaaatcttattatagctattaaagattattaac

SEQ ID NO: 301735 - DNA, 331 bp, Glycine max
aagaatgcagtttttggagctcaaaaacaaggaaccatggaatttgatataaggagagagaacacagatattcagagaatagatgcaatggtactgctgtgaacagttacactgaacttaagcaaatttcgatgcactcgctgagcgagttatgcttgctgagcgagaaagagatgtttggtttctctcgatgatctcgcttagcggcccaatgggctcagcccaacttgaaattaaaaaataatttggttttagagttgggcttagcgcaaagcagtgcactcagcgagttctgcagataagaaatcctgcaactctcgctaagccggac

SEQ ID NO: 301736 - DNA, 429 bp, Glycine max
  unsure (1)..(429): unsure at all n locations
gctcggccccgggatctctaagtcacctgaggctgcattttttgagatactnggtgnacttttactgccatatgcaaaagtgttgtaccccaacataattgctttagaagtaatataataactaaaaccataaccatgtctagagacataaaactaatgatacagaaactagaaatttcaccatccaattatctacaaattgtgatatttttggcaacaaaatttttataaataaagcaaacgttgtagatttgcaaccagccaaaaaaaatgatnttaggacttgactttatcgtacatgataatagatcaatcactattacaaaagattacttattaatntctacanactcacaaatgtcacccataatatacgaactcacatcagagttacgaacaaagcgtggtgatgcccccactaatactagt

SEQ ID NO: 301737 - DNA, 371 bp, Glycine max
  unsure (1)..(371): unsure at all n locations
tgccctaatntacattgatgtttgtatntatgggatgagtttgtatgccattttntgtttaagaatagggtccactggtaaactactttccaatgttgccttccagaaatggcccgaggacctggctaaaaggtccagaagacaaggcaccgaaggaactagttccgctcccgagtatgatagtcaccgctttaggagtgctgtacaccagcagcgcttcgaggccatcaagggatggtcgtttctccgggagcgacgcgtccagctcatggacgacgagtatactgatttccaggaggaaatagggcgccggcggtgggcaccactggttactcctatggccaagtntgatccagaaatagtccttgagt

SEQ ID NO: 301738 - DNA, 310 bp, Glycine max
  unsure (1)..(310): unsure at all n locations
agctgcngcnataatancaaaattgcctaaatcatttccagatatgcatgtgaattangaagcatcaacaagaatcaagccaaggctattgtgcaaggaatcaatggggcaaaacacaccaaaagattatgatgatggatggctcaaattctcacaaaggtaaacttatcactttcaaattgagctttcaaaactctcatgacatgtagaggaaaaacaaggatttcaaatcacaaaatgtcaagagaactttattttcagaacaattacccatttcttgaacatatcctataatttaaagaanaatatg

SEQ ID NO: 301739 - DNA, 424 bp, Glycine max
  unsure (1)..(424): unsure at all n locations
gacactataaaactcagctttagccaatggactaccttgaataattctttgtatgcctttgagccttgttcctttcctggtttgaacctacttaaaccctaagtgaaaaaccttatataccatatccttaaggaattttgagctttggaatggttttgggaataagtgtggggggtttttgtttcattggacaacttgtttttttggctatgcttcatgatgtattttggtccatacttgatgtacattgtatattggttaaatgttggacatgctgaatgaaatgttgtttctcaaagactaaagattaaaaaaaaaaaaattcgaaaaaaaaaaatcgaaaaaagaaaaagaaaagcaataagttgagtgaatagaacttanatggcacaagaatgatgaaactcttggttctactcttcat

SEQ ID NO: 301740 - DNA, 329 bp, Glycine max
  unsure (1)..(329): unsure at all n locations
ctttggaacccggatatggaatctgcaccaataatgccactaaggtccaagttttcaggccttatagttatacatcttataccgttcaacttgaccatgcacggatgtgatggtgacccaatccaggtgatgctaagcaccgtttgggaattgngatcaacagccctgtactgtactgaacattctacataaagaanagaaggacaacaaagaaaaccagcctcctcagaaatacagcanaatctcgtctcatgcagtcctcctctgttgttaaagacttgctagtcctgcatgcttcttcatttgtgcattggataaagacatgtatg

SEQ ID NO: 301741 - DNA, 257 bp, Glycine max
  unsure (1)..(257): unsure at all n locations
aaaaattataataaaatatattgataacattctcaataaaaaacacttactggattgtattttcattntgaaatggagaaggtagtacactaaaaanttaaaaaatactaataatatattattttacatcactcttttatatgttgtttataaatcagtatcaccctagttagtaaaattagcatgaattcttattaaatgatatacagcggtaaaaagagtgtaattttgatatatcgttagcataaattacattt

SEQ ID NO: 301742 - DNA, 222 bp, Glycine max
  unsure (1)..(222): unsure at all n locations
ggttttaaaataaaaggggttcctctttttctataattttattataaactaccccacatgtctccatttgagtggagcanaagggcccactntccctttttactgtgacccacactcagccacanaagtgagaanaatctgacctttgaaacgctaaaatcctgcctcngtttgcgtgtcgtttctctggttccagtttctcgcgtntctctgcgtccgtcg

SEQ ID NO: 301743 - DNA, 169 bp, Glycine max
  unsure (1)..(169): unsure at all n locations
ttctctccatgttactgagtccttcataaaaatattggagaagaagctgctcagaanatttggtggtgagggcaatnggcgcttagttttttanatctctcccagtattcatatanngctctctcattgagttgcctaatgcctgaaatatcctttctgatggtcgtgg

SEQ ID NO: 301744 - DNA, 363 bp, Glycine max
  unsure (1)..(363): unsure at all n locations
gctattggtggatcggcaaaagtcaggtaatggctcgcatggaggtggttgataattcccccaacctttggcatcaagatgtcaggtgctacgggggcctaattaagaaatttcatcaccggcttcctatgaggctcannatgcaggagcagccccaataacgagatcctggctagcattttatcaatggttcgatcactttgaantcactctgcttaatgattcttaggaatttgttgcgttctaagcagatggttccttcctgccagaattatnctctttcttggaggcttttcataggagtcttgtcattacaaggccttttctcccttgtatcacatactcttcttttcctttgcttta

SEQ ID NO: 301745 - DNA, 209 bp, Glycine max
ctaattactagcaccatatccttgcagcatttccatttcattgacacgagtgcagggcttcagaccttcaaaccaagtcttttatgtacgtgggactgacaatcctctttatagatatactcactaattgcacctctgtgtatgggtggcgacccccgatgtgatactgtacaatgtcttgtgactgctatgtatcccctgtattcatg

SEQ ID NO: 301746 - DNA, 334 bp, Glycine max
  unsure (1)..(334): unsure at all n locations
atctttttgttcggatggnggacctgnggttggtccaaccgcgtcaaaagtctaggcaccttgaaatggtcttgatggatgcaaaggtatgttgtgattcagcttttgctttgtaaaataatgtgatacggtttatgctctgttttgctgtttgggtgtttgatcccctatatgagttgtaatttatgggatctggttagtcatttcagagactgggttttaggttctctttctgggattttacgttggctnttcttgttctataatgantattgcgatttgattgttaaatacaattgtttttctttcttggtccatatgacatgttgaatga

SEQ ID NO: 301747 - DNA, 365 bp, Glycine max
  unsure (1)..(365): unsure at all n locations
tgctatcaatgttaatcccaaactcctttgcatatggtatttactcataatcagtttcgtgaattgtctgctagtatattggaaaagctatagattaattaaactaaaccaaacctgcaatacacattatanttttgtttgtaaagagaataaatattgaaatggacatgtntaaacaattgcaatttatcatacaaccatggctattcagtttccaattgattctgacaaaaataagaatatatagaagaaaataaaaggtttgatgagaattctaaattacccaaatacgggaaccagtgactaggagtaggatcaaataactagtggataccctctaacaaatgatagcagacatgcttaac

SEQ ID NO: 301748 - DNA, 297 bp, Glycine max
  unsure (1)..(297): unsure at all n locations
tccaaaggtacctaaagataaaaaagccaaaaggagacttgatggttcaagacggtgggatcaacatcgttctgttgcacagtagtttcacttggtcaggcaattttctactccagcagttattcatagataactcaactagtttccctacccatggaatgtangagagggggatcatgaacctaaagccacaagataagggacaatggaagatatagcatatgttggacaaaagggaagcaaacagttaaaagtgtctgatcaaacaagtgccttaaataatatcaacttaatagt

SEQ ID NO: 301749 - DNA, 426 bp, Glycine max
  unsure (1)..(426): unsure at all n locations
aaaaactttactagatcancttaatctaactgactactanttatttctatggaacatgtagttttttcccccaagattggaggaaccgaaggatcatacaccatatgtaaaaaaatgataggtgaagatactaagtgatgcgtgcatactacgaactgctgctggttctgcatcactcctctgttacacccattgaaaaaatgtaagttaacaatataatcatttagatatangggaaatttgcaaatctcttccatgaccataattcctgacttttgatcaatttataaaagactnttgaataagtaattacttattaaaaaatggttatggctttgaggcctatnttcttggttattcattgcacagcanagcatatagagtgtttaataggagaactttatgtgtggaagaatttgccatgtt

SEQ ID NO: 301750 - DNA, 331 bp, Glycine max
  unsure (1)..(331): unsure at all n locations
gaaattctgatactggggacagatgtcgtaccggatgtcacgacttcacgcttcagaacatgcagattatatgtgtctgtatgaacagattaaacaagtaaataacacaagagaattgttaacccagttcggtgcaacctcacctacatctgngggctaccaagccacggaggaaatccactaaaatagtgttagttcaaagtctaacagccactgtttacaaccttctcacctaaccactacccgtgcaatctctacctaagagccactcttagatatgagaaccctgctcactccctctcaaccacactcccgtgtgtacaaataaatc

SEQ ID NO: 301751 - DNA, 116 bp, Glycine max
cgctatgatggacccaaatgacaagagctccagaattaatgcatactttaactaagccatcagcgctaatacaacccgcaatggcatcgagcctctaacttaaggatactttacta

SEQ ID NO: 301752 - DNA, 195 bp, Glycine max
aaacccgcggaccaactaatcctgggcaatccctttgcactgcgtatacaaagccccccgacgcctccacagtgccacctgagcgaggcccgagcgattctctacgccggcgatcaacgaagggcctctaacatgttgagcgatataaccgccacccgcacccgtgacaacctgcggtgaaagaaatttacgcct

SEQ ID NO: 301753 - DNA, 447 bp, Glycine max
  unsure (1)..(447): unsure at all n locations
aaaaaaatgaattttcattgactancnaccggcatatactancatcggacccgggaatcctttaaagtggacttgaaggttgcaaactntttcagaccgnaagccatgctaaccaccttggttccttgatacagggcatacaaatccctttcttcagttgggtggcccttaccactcggatcacgaccaacatattgaaaatttgccctgcctttatccgtgccttgcatgcactgtacttcattggaccgcattatgcatagtgatggaaaatggcactatggtagtctangatcaaaactccatcttctagcctaagagaacaaagaacttatagataaattcatgattggcaatacaaatgatagatactgaattaatgaagtcaacacttttgggtcattttgacatatatgtgacacatccattatatacctagtttttaaa

SEQ ID NO: 301754 - DNA, 496 bp, Glycine max
  unsure (1)..(496): unsure at all n locations
nnnccttcgttaggggactgagtnatcanancttntatactcaagcttgtgaagggaatgatgatgggagaaaaagggatgggaatgtttctcaatatcctttagtgggaaaaaaaagcccataaaactcccgtgggtggaagaaacccctaccatggattctataaagtaattaagggaggtttttcatcccagggtccttaaagtccttatttaattatcaggtggattaagggttattagttagaataaaatacctttcctaaagtattatgggatggtaagggcataacatgatgcaattggttttgcctaattactactaagttaaaatggtttcatttatatttatcatgtcatgtgtactaaaaatttaatattgtaactctttatgtaaacatccatgatntgtacaaangatatgatntactttattagttttatatatgatgagtttaagacctagaaagacgaattcaaattaatgaagaagnan

SEQ ID NO: 301755 - DNA, 325 bp, Glycine max
  unsure (1)..(325): unsure at all n locations
aggagtgacctgatcagcgaactacnaccgcttactgagggggaagaggggctctctgcnnngcnaanaaagcggggggccgaacccggccgcgcaancctcaccgacaaaagccgggagccctgcggaacagaggcagaacctagtccgcccccaaaaagccccccgaagcagaagcgggccgcacagacaaaacagacgcgcgaagagagccacacgaaggccaccgaaaatgtggcaggcgagacctgcgaagaaaagcgaagaagaactacaagaggtcggaagaaacacgagagccggcgactaaaacgggggcgcaaca

SEQ ID NO: 301756 - DNA, 423 bp, Glycine max
  unsure (1)..(423): unsure at all n locations
tgacacaatcaatattctgtgtcttatcaagccactgttgtantttaacanataaaaagatttgtggtgtgtttgctcactgactaaatcttaattgtattacagacgaatatgaaatctaagcaagcacttagtcttttctatcaaagtgttttgaaagctttttcgaactatacaagaatatatagagagattttcacaaaacaaatttaaatgttagcgcacaggttcgtaacccatgtctttaaaacttttgttatttataggcattcatcttcaagtatttgttgtctctaaacaaatagttntcttcacttgagcttgcatatgatgtttatggtcgttggggcattgcattaaatgcacgtacttctttatgccagaaaaccactcttattcactctcatgtagaataattcagca

SEQ ID NO: 301757 - DNA, 373 bp, Glycine max
  unsure (1)..(373): unsure at all n locations
ttcttgtttcgacctacttacccgttgaagatcgaagaacgatgaaaaacgattgaacaacgtcgaaaaacggtcgaaaaccttcgcgaaattcctcacggaaatgtttcggaagcgcctcggcttagatattctttacggaaacaatttttccaagcaaattcgaaagagcgagaagtgcctaaggggctgaacccttttgcacttcacttcctcccctatttatagcanaataggggagatgcttgccgcccagctcgcccaggcgagcatggttgcttcctccataagcaacagccttctggaggaatnctctggagggcccaagtgggcctggntgctatttgcaccccctttttactaatacaccccc

SEQ ID NO: 301758 - DNA, 417 bp, Glycine max
  unsure (1)..(417): unsure at all n locations
ntgatcttccaccaccgccaccaccatcatcttagatctatatttttatattaataagaccttgaatttcaggcctggattttggctaaaataataatggaattggaccaattaacaatttccctatttgcatggaatgtttgaacaaatataaagtatgttatttgactatatgggttttatagataatctatttatgattgttgcttcatggtttggttgttagtttctcaatgaatgttgtatggatgtgtagttatatttgattatttcaaatttgttacgcactttggctctttgttgatgccaaaggaggagagaaatgggattaaaatcaagaactcacatgagtaatcaatntaattttaagatatgcacaaattcaaaaacaaagggggagaatctatgtgagtgatc

SEQ ID NO: 301759 - DNA, 326 bp, Glycine max
  unsure (1)..(326): unsure at all n locations
cactnctctacatgataaatgagtacaaccatttgtattcttgcagggggggttcctaaattcaaagaacactttgccttcttacaactatctctattagagaatgatatgcaaattaacaagtaattttcttctattcattagaagtgaccactccattaattgtatctgcatgttatagaatttgtaattcatttgtgttcttgaaatattattggtaggttataagcatcaattttggtgtagaaaccaaggtgtttttttttaaaaaaattgtctattatcctcttttagatgcatcctcattttttaaattgagcttatta

SEQ ID NO: 301760 - DNA, 300 bp, Glycine max
  unsure (1)..(300): unsure at all n locations
tcgattaccctgtgtatttctgatacgttggannattcaaatccaatntggtgaagagtcancaactcnttcataataatgcacttgtgtagatcgattacatgaactatggtagatcgattaaccagtgataactctttgaataaaaggtcaaaagttgtaactcttgacatgattttctcaaggttataactcttccaatggttctcttgatcagacatgaagagtctataaaagtaagaccttgacttgcattcaatagaactttttacaactctttgacaattttttagaacttct

SEQ ID NO: 301761 - DNA, 488 bp, Glycine max
  unsure (1)..(488): unsure at all n locations
aaaaacaaaggacttttagnatgtcnnnttatatatattacctgcgatggggctaaatcggataatcacagcgaagnnttagcctcgttgtcanacagnaacacncacgngggggggccttcgatgctatacgctctatttcgaangagttcaaaagtgcacccctcgaagcgttttatttcctatttcttttgggagaataattatagtcgtgtgcgttactactacaaattcgctttctattgactaacggaaggctaagtctccagggttggtctctcttcaggatcaaggacaactctctatgacgatgtattattactattaaattctgatcagattttcccctgcaccaattactctgtatgtgtggctattaattcatgcatgcctagtgcttgactaatgagctcagtgcctaaattacattcatgctcaatgatcgtacatgattaattggcgtatgtgtatcttgaacacatatagan

SEQ ID NO: 301762 - DNA, 334 bp, Glycine max
  unsure (1)..(334): unsure at all n locations
tatcttgtttaatggctagacatgatacatgtcagggcttggtttggttcaaggataaaagggatgccccacattatttccatgacacanatgcaaaaaatgatgatttggaaactttatgcaaaactggtcatgcatgcacctatgcggacactcaagtgtcaaatttttatggtcatgtgatgctagggctcaggattcatttctctatttagtcaacccacgcttccaaatatgttctttatcaattgtgcattcatcgagtcatttgggcgttcggaaaattttacagcatcacccttcagtgataccacattttttaaaaatggtttga

SEQ ID NO: 301763 - DNA, 325 bp, Glycine max
  unsure (1)..(325): unsure at all n locations
cacaacatcctccttcgttgtttcctttgttgccactaccacctncttcaatgagcgaaaattctcaaattcctcctcatttcattccctatttgccactccctccaccaccagtaacttataatcaatccccttctaccgaaaattctcaaagatctcaaacttttcttcaatgtcacaaaacacctctatcgcatttcataagcctcccaatagttatattcgtgcacaaactccttcaaatgaggaagttgatattacaatagaggaaggaggagggagttctacaaagaagaaaaagggaaaacgattattcttttcaatt

SEQ ID NO: 301764 - DNA, 367 bp, Glycine max
  unsure (1)..(367): unsure at all n locations
ntcaccagatcatataagataaatncattcatccaatctgtatatanntatcctccaaaatggtcaaattctctgccctatatatttcaaccctttccatcactggcacaggagtgaatctttctcatgtgcaatattaaagttatattgtcatccattcctcacaatcagaaaccacaaacattgccatatattangaaataaaaaacctaactcatactcaaacatangcacatcacacaacaacatgcaatgtcatctattaaaatagagcatcatcaatgaaaataataaaggaccatanacctccctacgaagcgcgtagacaatgcaaatgataacccttgaacatataanaccccaaatg

SEQ ID NO: 301765 - DNA, 389 bp, Glycine max
  unsure (1)..(389): unsure at all n locations
agatgaggaagtgtagaagggtgagaactcctgcttctantctttgaccacanagnggtacctagagatatgtcgcttgagatcaggacaccttcgggacgtcaggtggggtgctattgcccaataccaagcttgaccaatcctgacccaacccgggcatagtcggtcagtgagaacctgtgatgtacctaaacatgcgaagctcctgcagtcaacagataaaaggaacaaagaccacaaatcanggaggcttgtggtggctggccanctgtgaattatgtgtgatatatggggtgtggcctctggtaatcgattaccaagggtgggtaatcgattacaaggcttnaaaatgaagacaggaggctaagatggtctctggtaatcgatta

SEQ ID NO: 301766 - DNA, 254 bp, Glycine max
gtccgtggccaaatgatggtggggatggtggtaggcgtaattgttaacggcggaggtaaggtactacaacttcgatctagtttttttccgtataaaacttacaaatcaataatccgtaaattatataaaacttatggattatcaatccgtcaattatatataacctacggattatcaatctgtaaaaagacaatccatatgaattatgcgaattttcagtaatccgtatagtccatacggattctcaatccgta

SEQ ID NO: 301767 - DNA, 381 bp, Glycine max
  unsure (1)..(381): unsure at all n locations
aggatctttgctantcgccttaatatagcttgctgttaaataaaggtattcagaacatattgtttttaatgggtttcaagcctggaggcttcaaatttatattgaaaggacctctatctataattttggactttatgaacaaaagaaaagagttgtgtacatatacctgtcctttcactgcctgtgttatttaggataggctaccctcctttggcggtggagctttcaaaaccctaaacctcagttggcttctcaattggacatgactcaacggggatagggaagcactgactcacggagaaggctgagccactagagcacacgtcagcatcgagcaactgtaatcgatactcagaggaacacgtgtaactggaactcgga

SEQ ID NO: 301768 - DNA, 384 bp, Glycine max
  unsure (1)..(384): unsure at all n locations
accttctgaggttgccctattgtgtgctgtttttttttttagacaaattcccttagcaatcccncaaattaaggacttatcataactcgaaacccttatgctttcttagaaccctanaacaacgtcaaggatatcaaaattaagctcaggggtttattcaaacaaatcattattacttttggctcaacaggggtgcaagggataaattcatcacaggttagctttttggctgagtggctaaaataaaaagaacatggccttgatcatatccaccttatgtaaataatctaacagtctaagaatgatgcaaaattaataatntataaacagacgttctctcataattaagttcacacagctcacccggacaagataaagttatcg

SEQ ID NO: 301769 - DNA, 108 bp, Glycine max
atgtctaagcgagaccttacaactagggacagctagcagccaaccttaacactaccaactctcaagaaaaccactcatattatccatctaacatcagaattacaatac

SEQ ID NO: 301770 - DNA, 143 bp, Glycine max
ctataaaatgcattaaatatgataaaatgggacttgtactcacatataatattagtttacaaaggtactcttcaggaggtttttgaaaatatattatacatttaatcattagggtcttactatgtgctccagtatctttattt

SEQ ID NO: 301771 - DNA, 469 bp, Glycine max
  unsure (1)..(469): unsure at all n locations
agaaataccttttnccttagtangcannccnaannananattacgcctggcgccactaaaanagaaggagcactggagcggagaatttcttttatggtngccaancnggcaaatggatggtgaaggaatggcattgaccatatcaccgggagagtgtgaaccttaaattttgattgacacaactatcatttaagacctggatctttggcatggaatcttctgaaagagtggaactgaattgtatgaaaatgaagatgatgaaggctatgtttgattgtgatagcacttaccaaaagctgacctgtcttgaataataatccctcgacccagtttgagctgaatgaattattgatgattgaacctgacctatcagtgtatctctactacctgattangtgtngagagctcatcaaggagcgtggtcaagcaattgtccaattggggagaatatcaggaaattattcaaatg

SEQ ID NO: 301772 - DNA, 327 bp, Glycine max
  unsure (1)..(327): unsure at all n locations
tttggatgataccaaggatgatgacaaaaagctcaaaagtcaagaccacttcatgttaacaaatatgatgacttcaagattcaaagaatgagttcaggattaaatgaagagtacttcaaggttcanaaggaaatttgatttcaagaatcaaggagatttgatttcaagaatcaagaatcaagattcaagattcaagtcccaagaatcaagatcaagattcaagacttctcaatcaagataagtattaaatnttgttttcaaaactgagtagcacattaattgttctcaaaaaccctttaccaaagagttgtactctctggtatcgat

SEQ ID NO: 301773 - DNA, 439 bp, Glycine max
  unsure (1)..(439): unsure at all n locations
agggcgctgncccttgattcctgancnacattntanatactccgctccacaatcccantnccttgaataggccttctttttttttttcccagtggagtcgccaactgtcgcaacgtgcccttctcgggcgagcgaaggcgaggctcacgggtgcgctttccaaggaggaaagggtgcggagtctccaccacgttatttgtgggaacgtcggaaaaccaaatgaaaccggcaanatgaaaatctaagncgggagttgtattacgcttgagaagtattacacctcttacttttctcgaagacacagcctatttttagaatggggaaatgtgtatctaactttattcttttatttttgaggcgacaaagcgggctttgctctactaccctctcaagaggagtcgactactagtcttctatgctgatagtgatctttacttag

SEQ ID NO: 301774 - DNA, 371 bp, Glycine max
  unsure (1)..(371): unsure at all n locations
cttggccgagaagaatggatatcctgcaattaattttccatgttaaacagtctgaaagtaccaaatatttcctatcaatattcagggttcaagacacataatcatggtacctcaactactcagtggtatatttaggttaatccatgcaaaggtgtccatatctaactaataaatcaaaatgtgaaccacaattggcactctaataatggttcagaaagtttattggatctaagggatctaaggataagttatgcattcttttctttttcaacacttgaggcttgtgaaataataaatgttcacttctgctttactctttcactnggtcatgtactatgcatttgctacttatttgtctacttattggagcg

SEQ ID NO: 301775 - DNA, 373 bp, Glycine max
  unsure (1)..(373): unsure at all n locations
ataaaactcagctagccaatttcattgcatcctattatattatgatctttncggagttttctggtaactgggtaggttacttcttcaagtaaggatattacagtttgaagtaggtgtagatatgttttcttctactcctctctttttatctttttttatgtgtgcgtgcgtgagtgtgtggcatgagatcctctcatatgttgtcacttatcattatagagaacggctgctctagaaagatcaattagggagaaagttggatggcagaaattcataaaaagaggagtgcacacactaaggaagctacagtaccaggtttttcttttagccgaagtttgtaattgccttgcaacattgtattatgagacttgat

SEQ ID NO: 301776 - DNA, 249 bp, Glycine max
  unsure (1)..(249): unsure at all n locations
ctttttggccacattttaaggagtccattattcacttagaatcaaaatttcagccaacaattcattcaccagaactcaaattcacaatagacacaatcataaggaaacctaaacgttcaagaaaaggatcacaatcaaagactctccaagaattctgcatgaacatgttaaggactaattaacatgcaaagatttgactcanataaaataataggctaaaagaatttcatacactcatgaacaaatgag

SEQ ID NO: 301777 - DNA, 363 bp, Glycine max
  unsure (1)..(363): unsure at all n locations
actatgtctcatttttccttacgaacgttctcttgcacaagacattctattaactaagaaaaatgcacccatacataatcaaggcagcttcattacctagattatttacacgtacttccaaggtgtatttgttacttacatcacacccatctccttggctaaatttacatacatgcatactcaaagcattttggggtaccaaaaattgcacatgtgcacatcttggtatttctaatacctatacatacgcaaacttcatgatgaatcttgactatcttcacanaaaggtgctacatttcatgctcctttntcaagttttgctacttaaagccgcatgcgaattcagcatatttcctttgctga

SEQ ID NO: 301778 - DNA, 431 bp, Glycine max
  unsure (1)..(431): unsure at all n locations
gctttcnagtttctggtntctgaacctgaaaacttgtgctttcatctttcatctcttctccctttgccaaaaataattcgccaaggactaaccgcctgaattctttttgtgtctctcttctcccttttccaaaagaacanaggactaacggcttgaattcttttgtgtctcccttctcccttgtcaaagaattcaaaacgacacagtctgagaattcttttgattcttccctttcccaaattcaaaagtgttcaaaggactaaccgcctgagaattattttgtatccccattcacaaagtatcaaaggtttaacagcctgagatctttgtcttaacacattggaggctacatcctttgtggtacaagtagagggtacatctactngtgtttgactgacaacaagacagggtacatctcttgaggatcattc

SEQ ID NO: 301779 - DNA, 344 bp, Glycine max
  unsure (1)..(344): unsure at all n locations
cttttgagccttgtttccctttccttgttttgaagctcactacaagccttaagtgaaaaaccatgatatcaccatatccttaaggatatttggagctctggaattgttttgcgaataagtgtggaggtttttgtttcattggataacatgtattgttggccatgcttcatgatatatnttgagccatacttgatgcacattgcatattggttaaatgttgggcgtgctgaatatgatgctgtttctcanaggctacaaaaaaaatcgaaaaaaaaacaaaagcagtaagttgagtgaatagatcttaatgacacaagatgatagactctggttcactcttatgt

SEQ ID NO: 301780 - DNA, 286 bp, Glycine max
  unsure (1)..(286): unsure at all n locations
cgtaacgtttccgtaagtaattacacgaagattctcgacagttcttcaagatccatcgtttgttcttcgttntcttcagtcttcaacgggtaagtacctcaaaccaagcttttcaattcattatatgtacccgtggtggtccacattgtgtttcatgtattntcattttcgttttcatttactttntatacccctttttgacgtgcttaagccatttatttaagtcatttctcacctaatctaaaaataaaataaatttccaccgatcgtttgaattgataatccg

SEQ ID NO: 301781 - DNA, 381 bp, Glycine max
  unsure (1)..(381): unsure at all n locations
ttttttgttaggatgcttcaatggaggaaaagaaagagggagagaaagatagaggggggagcacgaaattgaaggaagaaaaagggagagaagttgaactctgagttgtgtctcacaagactatcattcatcanagttacaacaagtgtttcacatgcttttatttatagactaggtagcttccttgagaagctttcttgagaaaacttccttgagaagcttctctgagaaaacttccttgagaagctagagcttatctacacacacccctctcataactaagcccaccttcttgagaaacttccttaagaagattcctaaagaagttagagcttagctacacatacctctcctatagctaagctcacctccttgagatga

SEQ ID NO: 301782 - DNA, 405 bp, Glycine max
  unsure (1)..(405): unsure at all n locations
ctgttngatgtgtggaggccttgttagtatctcattgtaaatagggacactatgcacaatgttgttaataatcccatctacatctttagttcctattcctaacatatacgtctntatacgcacttccatgagatgttatngctctanaggttatcttcaagaggtacataatgtttatttctaaaatcattgtcgaaaaggaatgtatgaaacgttnttgttccaacatangttaatatggcttagcgtatggtttcggtctcttctagttcccgtgttggtggtcgttcttcgtctttttattcttgatctttaagtttgatcttttaattattgccatctgttccatattncggttatgtnggttttacttttgtgatntacataaatcttgctggtatgtgt

SEQ ID NO: 301783 - DNA, 75 bp, Glycine max
tcatgatgacgattcaagctgatgcaagcagtcttgatgtttacgtagatgatgacacactgctctaagagtgat

SEQ ID NO: 301784 - DNA, 113 bp, Glycine max
ttgttgttttcttgacaataccaaacaaaactgggaatgattgcgagtcttcatattgttccggtaaggcacaccgtcctctactacttcaactactgttagatgccacttgt

SEQ ID NO: 301785 - DNA, 280 bp, Glycine max
accagcgggacattactctgagggcataaatggcatataacctcctcccatgaatgcagacatcaatgtaaattgagagcaagcttatgcgcatattttcttacaaacgttctcctgcacaagacattctattaaccgaaaaaatgcacccatatacaatcaaggcagctgcgtcacctagaatatatacacgtacttccaaggtgtatgtgttacttacatcacacacatgtccttggctaaattcacatacatgcatactctaagcattttgggtacc

SEQ ID NO: 301786 - DNA, 485 bp, Glycine max
  unsure (1)..(485): unsure at all n locations
atctactggnttgattgttcatcgaacctgataaaagcacggggcaactgctggagcgtataaaggggacaccaaaatgctctttttattagccgcaaccgggggggggtgaggagcttcggcacactctcntcaccaccctaacgaaattgaccatgtagtgcccacacagactcttgcacacccacatctatccggactgggacaaatgaaaagctcccactggcgcggaaatcaaacaaacgcgaacgtaaggagcatttgagcccgaaaagcactctatgttgaagaataacgcaaattagaagcgcaacggcggcatcacacagaccgggttgattcgtcataaagtgaggggaaacaaccaacaatctgtgcgaataacagtgggaatggtaaagtacaggatatgatgcctttccaacctcctggagaaccggcggccagagttcgccgcgcagatacacagagacgaccgcatcgcg

SEQ ID NO: 301787 - DNA, 86 bp, Glycine max
caagagaccaacaaaagagcaagaaaaaacaacaccagcaaagaacaccaaacaaacaaacagcacgcaaacaacaacaaaccaac

SEQ ID NO: 301788 - DNA, 252 bp, Glycine max
  unsure (1)..(252): unsure at all n locations
agcttgcanaatttatcactctatatngcaaacaggttcaccacgagaaccttgagcctataanttttgcaagatagaacaaccctaatcacccatttacaaactcctccaccagcaaaacgattccacattntccatttccccctttttatcacgacatcaaagaaaatctaagcgaagaagagaaacaagaaaggccacaaaacaaacttataagtcgaagcgagaccttggtataacagagctattcat

SEQ ID NO: 301789 - DNA, 318 bp, Glycine max
  unsure (1)..(318): unsure at all n locations
gggnncgagacttagactatgcaaccgcccnaancgagaagatccnccttttttttttagacaggaggtggtctaatcacctggaagcgcagagtgtgttttcctagctctatctcttccttatcctgttacgatttgagattcgatgctccaaacccccaagtagctatattctcaagcccgttaggacctacgcttgccaaagattataaacatccggcctcaggaccagatccccaactaactctgcctctctcacgggcactatggcctatagtggagatctgcaatttgcctttgaaagctgagatagacagc

SEQ ID NO: 301790 - DNA, 389 bp, Glycine max
  unsure (1)..(389): unsure at all n locations
ccagagagctagagacntctaataaacccaccngggaggggaaaacgggatttgttattgagtncgacgagaagggtttattaaaagttctctctacagagatatatctagagcacacacaatacaccatacaaggcacttagagtagcgtgaaagtatacatctcatacctcttcaacttccttagagattgtcccaatgtggtatgtattgtgctccctattatatactaggctcccataagacctttggctcaaaacgttatccatattctctacattttaacccggttattataaaacatcttatggcttgatatggtcacattggtcaggcttgaaatctatctttatagcggagatgtattctcagaaactaagaccttttgc

SEQ ID NO: 301791 - DNA, 227 bp, Glycine max
  unsure (1)..(227): unsure at all n locations
atagtcaccctcgatacaagaccgagatgactatagagtagtattccctcatatttgatctccccatatcctacaacttagtatatgtgttattatcatttcgaaatgttgtgacatgtgtttcaataaatccaacgaataaaaacacaataaatggtaaaacaaggattctttgataaattatnttcacctcacacgtagatttataacatgttcttagttaagta

SEQ ID NO: 301792 - DNA, 408 bp, Glycine max
  unsure (1)..(408): unsure at all n locations
aataaacaaccacggactctattgaaatttggacctttataacttggacccatgctactaatagcatcaatcataggtngataatatgctgaattaattgcattaaatggcacagaagcatcaatcatccactttgcaatggcaaggtcacatttttctatgactaccttactttgcaacccactctttaaagacgttgagctctacgggttgttttatgcatgaaatactgacctatgcgaatgatgttcttcccctatttaggtggattgagattacatactcttatagtgctctgcacttcatccacaactattctcatttgatcttcacagattcattactatccacatatgcctctcgacatttcttctcttgttttacgtcaatcaagattatgcttcattg

SEQ ID NO: 301793 - DNA, 498 bp, Glycine max
  unsure (1)..(498): unsure at all n locations
gataaagaatcgnnntgnntgtagcntcggancntggttattacgcggaggaactgatcgnggtacatagaacacaattgncttataanaaacggacccggggagggttgaggttgggccccttgtgaacccacacaaacattggcctttcattgcgcaacctggaaccaatggaccacccggagcttaaggctgcaagaattaccaaaaaacggcccgaccctagcggggaaatccaccccagcncaagcattatgacccttgcagccacagatagcaccttgagtggaggatcaacctaacctcagaatgcccanccttcacaacaaccaacgcaggctgctccttcttacaaaaggctgtggccgagcgaacatacattcttaccaatccacaacagaacaacccagaacaggcacagtgaggcctccacaccttcctcgagacnttgagagcaatgatatgcgaacatcagttcacaggaacagagcttatcag

SEQ ID NO: 301794 - DNA, 559 bp, Glycine max
  unsure (1)..(559): unsure at all n locations
nngggggcgcgccgattttatgatacctaagcattgcatanccgttanantannnangctncnctttcancanagagaagagaaagatgaaggatcgaagattttcatttagtgnggatgtctcctccacctctagaacctcacaatcactcataacctcatctcaagctcttaggacgacttccctcttcgagcttcgttctctgaanggtcttcgtacagcaaaaatctctcanactctctagaacttggacctttctctctctagaaatctctagacatgtagaagcttcaaaanaggccaaacctcccatccannatctgatttcacgcttaaatangtggcttcgtttgtgcttgcgcgcttatgcgcactctgaactgcttagcgcgcattactgaatntcngcttagcatgcgtcttctcgctcagcggatggactcangtggtgcgctcagcnggatgaaccctcgctcagcgaacatgcacatctcatccttcttncagctcttccttgcgctcaccagaagtgtgcgctagtggatgctcgctanctag

SEQ ID NO: 301795 - DNA, 368 bp, Glycine max
  unsure (1)..(368): unsure at all n locations
agcttatataagttgattcaaactntctaacttgtttttcttgttttaaaaatcaaacaggtcccttaagaacaaagtttaaccaagttttcaagttatacttctattgtatctattaagcacataaaatgaatgaccaagaaagtcaaattacttgtttttgcatctgcaaccatcgcggtccataataatcatattgttgtccatagcccgtatgtgctcaaggcaattacagaacacaacattgataattcaaccaacatttctgtacaaaagcaatttgaattggtacataagcaaggcaatatctaaacctacctctctgggcacaatattaacaaaatcaattcaccactataatattcatc

SEQ ID NO: 301796 - DNA, 367 bp, Glycine max
  unsure (1)..(367): unsure at all n locations
tagcttgagatgcctgacctttagcaaacagtatgtattcttctgcgaacagtaaatgagaaacacgagggccatttgaggtcaacttaactggcttccacctcacctcccatcagacactacctaagagatcatatcaccaagcctctccatacatgatacaaataaatatgggaacaatgggtctccctgacgaagccctctcacaggaataaaactattttttgttctacctccattccacatgatagaaatagaagtagatgacagagcatgtataatcacagacataatggtattatgaaaataacaaaaatnaaaaagagtttcccaccaacaaaatcctagttcacacgatcatatgcct

SEQ ID NO: 301797 - DNA, 496 bp, Glycine max
  unsure (1)..(496): unsure at all n locations
taacacaacacaacagatcgggaagtagcctaaccaaactttgatgcaatggcttttnncncnnngnncgggagggtgtggtgttgataacatcccaccccgctctccaaacacaaactatgataactgttttgtagacatccggcctatttaccagtgctccacacagcggcactgatggacgccagtaggctcgagttacttcttctatgcttacacccctgntataagaacatactaactacgatttccncacccactgccggatgtcctcgaaggcaatgacgattacaaactctgtgtcttctcacctacatcgatgtacactaaacccgtgatgtggacgctattactccaaaatcataccttcgccgattctatgtgaatacagctctagcgactttctagtctcatcaattcggctaggggcagcgaaagactcacttaccatggtgggatctaatacatctttagaccccgcgctagctacctgtcg

SEQ ID NO: 301798 - DNA, 424 bp, Glycine max
ataataatagtgggtgtagcggtattttatcacaccttatctcatccagagtttatactgtctagactatatcatattcaaatcttattgcgtccagatcgtatgtcgtcacgtcttatcttatcttgtccagacgttatgtgatctggctcataagtctggacttaaaatagatttgtaagtattggggctgaagacctatataacagcaccaatgtgataggctagggaggttttgtccggagaggagaaggattgctgggttgtaggaattcagcgtatagtactgtccatgcacactgctcatggagaggaaaatcgtcgttgcgaacagcttaatccatactgtcgaaatgatgtcggtgatatgcgtagggtacttcgcgcgtaacgacctgaatcataagatatggggtcgctatcc

SEQ ID NO: 301799 - DNA, 527 bp, Glycine max
  unsure (1)..(527): unsure at all n locations
nagggaggcagatgactaggnccatgcancancgcgacacntnaatnnactcaacctnggcacgatntatgngaagcacagtgactggagcatattttgttatgaatcatccaacataatagggagcgaattcatagtgacccgttagtacaaaacgcgagatgactatctagaaatattcactcatatttgaggtcgacatctccaacaactctagatagtggttatgagaattctcaggagaatggagctagagcccatgatgaacttccaacagaatgcgaagcctcaacagatcatgcgctcaccactatattggtgatatctcaaaaggagcaacaactacatagtctcttacagattatgcaccaacacgctttcttgccatgatggagcctaaatttatagaacccttggagtgaaactgaaccttgccctccataaaacgggacaagtcgaagaggcaacgtggagcccgataaaacctttataatccgtgctcgaacaaaggggttttaaaataatcn

SEQ ID NO: 301800 - DNA, 169 bp, Glycine max
gtcatagcatgaacccacgggcaaagcatttatgcccgggtggcccctacaagatttacggtagccacatcgtaaagctctacaccacaaagaatcaaagctctttggagtcccagatctaccccgacaactcttaacgcccaccagacttcaccccaaattctacccc

SEQ ID NO: 301801 - DNA, 247 bp, Glycine max
aacctaacgccaccttgcgtaacactaatcttacacactaaccgagcttgtacactaatgcatgaccctgaaagtggctgatattatcttacgccatcctgtgcttgcccacatctacgaaattgacctaaaatggacttacgtgagatgcctagaccactttctctgaaaatttatgacagacctacgcatttcgcttaacccgatcatagtacttggtttaacagctaaccgtagaaggctaccc

SEQ ID NO: 301802 - DNA, 497 bp, Glycine max
  unsure (1)..(497): unsure at all n locations
gccgttggatctagtactnnctgannaaccaacnnaaaacgaaccnagattgaagagacggacagacttagattctatgtttttcctccgcggacgcgggagccacgtggaccagtgtgtaacttcttatctctctccctaattagttacggggcaacaaccgcgtaagacatctactgttgtagccgcatctatctgcgagcggatcttgcgttgctgttgatcactcccatcagcacatgagcaataccacatacaaccattctaacaatgagctgagtctccaaaagacggataccacaacgcgtcgtcttcggcctacaatactacggctgccgccaccccctatgagctccacaggacctattgtgacggcaatggcagtctcctccaatcggtcccctttcacaagcccttttgcaaacgagcataacctttaactcatgatctcacagtaacaggtcttgtaatactcccaccgcaactcagcctgaccc

SEQ ID NO: 301803 - DNA, 323 bp, Glycine max
  unsure (1)..(323): unsure at all n locations
ttaaaagtcttattaattagaaaggtggagctttaggctttaaaaaagcctattacgcttgataggttggtatgtttatataataggcttcatgaacgtcaagaaaataatgtatataatgatacttgaatttcattnttgtctactaaaaagatcataaatgggtctttntgaacatcangaaaataagttacccttattaagaggtttttcttttgctataacatccaagaatntaatgcaaattgaggataaaagatagtgacgaaacaagtcatgagacatanaagcatcaagatctcagtcctagccggatgatgatg

SEQ ID NO: 301804 - DNA, 332 bp, Glycine max
  unsure (1)..(332): unsure at all n locations
acttgggtttgccttgttttatgnacnntcaganannnggnatagatacacattttnnttgcccaacccccgcgggtttaaacaaaaccccccccccccacnnncncaccccaccaaacacaaaaacaacacacacacaagaacaccacgaaaaggcgatttaacgggggatggtgtaataaaagaggagggggtgaggaacatgtggagctggggtaatgtgcgaggagatattacaagtgcgggtatgaccagatactaagatttaaaatatatatcgggggtttaggtggaccggtaaacggataagtggagattcaagaatggggtgg

SEQ ID NO: 301805 - DNA, 382 bp, Glycine max
  unsure (1)..(382): unsure at all n locations
agcttctccccctattttctatatatagggggagaagtgaagtagagaaggggttcagccccttaggcacttctctctctttcgaatttgcttagaaaaattgtttccgtgaagaanatccaagtcgaggcgcttccgtaacgtttccgtaacgtttccgtgagtgatttcgtgaaggttttcgaccgttcttcgacgttcttcattcgttcttcatcgttcttcagtcttcaacgggtaagtacctcaaaccaagctttttaattcattctatgtacccgtggtggtccacattctggttcatggtatttttattctcgtntcatttactttttatacccccttttgacgtgcttaagccatttatntaagtcatttctcg

SEQ ID NO: 301806 - DNA, 556 bp, Glycine max
  unsure (1)..(556): unsure at all n locations
cgcccccgcaggacggagggccttgnagnagnacccctngctnnactatagannacnncgaccgnnngacgcgnataagtggactgtgtggcaagtcancaaataatgngttatactcgcgaatgggacggacaacatggaagggtggatgattcgtcaacaagaagcaaatcacaccaaaggcctcattttcgcttcaagtactaaatactaggattagcgttcacacaaccagagaccttgactccaaaactctcttaaagatcaaccctctgcctcacaatgaaatgtgctctagtcattcacagcacgtgtatgcgatcaccaatacatgctatcgattacacatggtttgaaagtgtgcaactcgatacacatcatatgtactcgactacaagagactctgaaacgtggtattcaattctaatgaatgtcacactgtcaagaaaacaactgtgtatcgatacactattctgtatcgataccaagagattttatgatatcgcaccgcacatcttcattaattggatgcctcaagctataaagtactggccan

SEQ ID NO: 301807 - DNA, 389 bp, Glycine max
  unsure (1)..(389): unsure at all n locations
cacatgtgngactacgtggcggtcgtgcgatggtgcacaacaagtattccacatccacaatgcgcgcataatcccaccatccgctgttgcccacctccatctgagctcacgtactcccacgtagcccatattcttatttctctcaacaccgggtccccatcaatcctcccaagtttctccaacatcaaagtaatacaacattcacacagcacatgctatcgcagccaagcataacagggcaaaggcagaatactctgcccaataacaccaaccaaaatcacagcttttctcacttaaagaccccagtaacaatttcttcgatccaattcgttaaccgttggatcgactccaaaattgtattggaagtctataatgtatacgcctacatt

SEQ ID NO: 301808 - DNA, 440 bp, Glycine max
  unsure (1)..(440): unsure at all n locations
cccgttgattcgtagtaactgaacatccaacngactaaaactgagttgattatggagagttgatttcttttgtttcacagagcggcgcgtgtacactaactatcaaactcttgccttcgcaaggaattggccccaacgagcttgccttcaaagagttcaagaatggacaagtaacccactgaactagtccgctcccgattatgaccgtaccgctcacgagcgctgacaccaccactcttcaagcctcctggatggactttctctgggacgacactcccgcttaggacgcgagttactgtttccagaggaataggcgccgacggggcatactggtcttcctggcattttatcccattaggcttatttatccatgttgccatcaagaggcgccgcatgaatccggaaggcgctgctccttatcctccatcccactctgatcc

SEQ ID NO: 301809 - DNA, 371 bp, Glycine max
  unsure (1)..(371): unsure at all n locations
agcttgngacagattgcattagattatcagaagctgaccacaccatggcattactcaatanaggctagttcatattttctatggtgaagtgtcctcacataatgggacgagttgtgatgctacttctggnggaaaccttcactactggaaaaagggaattctatgtcggttctacaacactttntaagacggttttgaactgtctttgttaccaacgtcgtagaaagtcaaaactttctaagacgaatttctgaaaaaaataactgtcttagaatgtattttttttaaaaaaaatanaataaaaattgagaattctaagatgattatctggaaaaccatcttagaatgtctacaatctaagaaatgtttct

SEQ ID NO: 301810 - DNA, 461 bp, Glycine max
  unsure (1)..(461): unsure at all n locations
ntttagggaatccgangatgaccntnattccaacngcatgacttatacccccaacatgaaaaaattttttacccataagcttaccacgcgcgtgataaataaaattcaattttaggtccaatcctttaccacaaccaccgattaaaaaaacnttgattcttggagaatgacccaaacggtattggtgcgtactacattataaaacaactttgggggtcacgagttggtggatctgacattccacaccaaattttcctccaaatagctgatacgtaatcttctcttttgaacatgttgttgtgtgtgttgacactctgaactaagcacccaacaccatacatatacagaagagtgaagagaaatcagatattttgtagagagaaaaaaataaataacaggggggttttcttctttcttcttggtcctttcagattggtcccacaacactttcaggaagcaan

SEQ ID NO: 301811 - DNA, 400 bp, Glycine max
  unsure (1)..(400): unsure at all n locations
agctnctacttatgtggcttgttggtgcttcttcaccttcttgtctgcaacgcgaatattgaccattgttcttccttcccgcaatgcttcttttcatgtctgcctgagtgggcttataccctaaaccatacttcccacgatatccttgagtatttatcaggctagtaatgccgccgttgttgtttcctaaacccatcccgggttcaaaaccgttccccaacataactcgggccatcattaccactgcatcggacagacaaagttgcccatagagggagtccacggaggagatgctgaccacctcacaagactggaaagcagtttctaacgattcttctgcggcttccacataaggcatggaggatgggcagcttaccaagatatcttactcgcctgacac

SEQ ID NO: 301812 - DNA, 488 bp, Glycine max
  unsure (1)..(488): unsure at all n locations
gcagtgatgatcctacgaccctganacgcgaacnnnacanannannncannaatgacccgctaacctagaatantattatcttancgctcttaaccnanggatttagaagagcttatgggctgagtgcaacttgaaatcgtgcaacccacaagtcacccctaccgcccaccatggcatcccccttttggtctccagacaggctgatgcttaggtggccattggaccctttataccacttgaactaaacctactaaagccctttagttgataacgcacaacatatatttgtcactcaacgtacaatgattgagccatatataactactcacactctaaaatgaacatagtgtgtcattaatcctctcatttggcatatacaactacaacttgactgtctcttgaactgggctcgtttctatagatgacacacttgtgagagctncttgctttcttgtctagcctgtgaagactcagccttagtgatctt

SEQ ID NO: 301813 - DNA, 274 bp, Glycine max
  unsure (1)..(274): unsure at all n locations
cagacatccaaccatactataaggacaattntcagtttcttctaaacttgataacttattttagccccactaatcctacaagagagaatatagttctttttttaaaaaaacacacaattattttcttccttggaagcctctttggatctgtgcacacctcagttgcttatcagttaccaaatgagcaatgacaataactcattgttgcaaaaattgccaaaacctctatcctctaagtgaattacaagacgcatgagtcaaacttcgctactcg

SEQ ID NO: 301814 - DNA, 334 bp, Glycine max
  unsure (1)..(334): unsure at all n locations
tctggaacggaggaatttgatacataccaatgcaaacacgattagactatcaactatctttgcaactcttgatagacgtctgataggggagaatgaacaacaagctattaagtggctacttccttcaagatcattgccttcctttattccttttcaaaatgtntctgttgaaccaaacttgaacgtctgattctaccctagtttcagaggacatcacatcttggaatggaaaacctgcaacaaagtctgaagaagacaatggatgttgggactcaagttcttgatcctaagatgaanaagctcanactaaagaagctaaatctacttaatctct

SEQ ID NO: 301815 - DNA, 361 bp, Glycine max
  unsure (1)..(361): unsure at all n locations
agcttgccttgctcatgatatatttganggacttatgatcactatgaatgacaaattccttgngataaaggtagtgttgccatgttttcaaagcccgtactaatgcatacaactcctaatcataagttgaatagttaagggtaggaccacttagcttttcactaaaataagcaattggatggccttcttgcatcaacacagccccaatcccaacatttgaagcatcacactcaatttcaaaagattattgaaagtttggcaacgcgagtatggnggcattagttagctnttgcttaagaacattgaaagcttcttcttgtttctcttcccatttgaaaccaacatttttcttgagcacttc

SEQ ID NO: 301816 - DNA, 562 bp, Glycine max
  unsure (1)..(562): unsure at all n locations
cgcgnccctaaagaagggaattgnngcangnatcccctgcgaanntcacatnnacnnaacnnnganctacttattgcttttgcacatggccagaanataagtctcatncatttatgacgnaactcctggggtgtactcatctatacaagcaagtctgcgtatgcatcaagtccttgactntcaagacactgcctgagcttcaacaatgctcggctctccaactgtcggacnactctcctttggtcaaaccaaacaccttgccaatgtctgacaacgttttctcctcgccatcctcaataccanatcttagccctgatatgcccctttcttttgggcttaagatatttagagggtgtgcacatgcatcctcattagctgtggtgagaccagtcacatctgggatctcaanttgctgagtctgcagtaatctcctgcaattggataacaatgtgatcaatctgcgacattcataatanntatgttgctcacananggcagaagggtctattctgaccatacccaacattctccacattaggagaagaccacgctacagaaattn

SEQ ID NO: 301817 - DNA, 286 bp, Glycine max
  unsure (1)..(286): unsure at all n locations
agcttgtgttattctatnttcctctcaccctccattcttacaaaaagcttttcaagagacctactattggtgactgtntttcaagagaaggtcttcttggttgaacactgaacacaagggaccaacattccttggattcattgtaagaagcgggatttgcttcttggttgatcactggacacanaagaccaacgtcttttgggttcattgcaagaagtgggtacaacttcttggttgttatcactagacacaagagaccaacgttcctttgggttcattgcaagaa

SEQ ID NO: 301818 - DNA, 307 bp, Glycine max
  unsure (1)..(307): unsure at all n locations
ataagctgaaccatgttatcaataaacacatgttgttgtttattcagaacatnagaaggnatctgctttatcttagtgagagtgattctcctanattcttgagtgattcaagaacacctcggctgtatcaaaggactttcacaacctttgtgtgttgccctcgctggaaagagtgattctttccttcctttcatcatcacccttgttctttcacaccacaattccagaaaatccacctctgcccagaattatctcgtggccataactcccattttacgcactcaaattaagtgattcttgagcctaa

SEQ ID NO: 301819 - DNA, 329 bp, Glycine max
  unsure (1)..(329): unsure at all n locations
acaaganaaaaactagnatatgagtacatggataatggaagcctacactcctttatttttggtacgtaatatgaagaatgctttcataattcgattaagtggacttgcatgtttgtttgtttgttttgctttttaattccagtcacaattagcggctctttaatcttgaatatcttatattgaatgaatagcttgctttgtaaaatcacagataaaatanagggtaaatttctggattggcctcgacgcttccacataatatttggaatagctcgaggacttctgtatcttcatcaagattctcgattaaggattatccatagagatct

SEQ ID NO: 301820 - DNA, 296 bp, Glycine max
  unsure (1)..(296): unsure at all n locations
gagagagaccaatcatgagcattaatatgttcttgaaataggagttagctgtttgctcaaagtccaaaagaaacttgtctcagcgtctatgcganacanagaccaacatgttagccatcgtcagncagtaccaagaagaactaaatctagccacgacccatgagcataaagtggcgaatgagtatgcccgagtatacgtggaaaaagaggctagaggaagggtgatcgactcattacatcgagaggcgacaatatggatggaccgattngctcttactttgaacgggagtcaagaa

SEQ ID NO: 301821 - DNA, 323 bp, Glycine max
  unsure (1)..(323): unsure at all n locations
agctntaaccttatcgtctctcacagtctttagatttgggagccaatccaatccttgtgttcggactctcagccacttatgatagctgccgatgatcccattactgcttcccctaagctctctgtcctttcttcacaccgcatcacatgccttgtgaactccttagagtaccctcgcattggggttactgaaaccccgtgcgatgaaaggcgtgatgcttttgtctgatggcactcctctcatggggtagccaagctgtcttatggcgaggacgggattataattaatacaaccncttgttccatcaagggaacatttggaca

SEQ ID NO: 301822 - DNA, 357 bp, Glycine max
  unsure (1)..(357): unsure at all n locations
agcacgtgaagacatggcgcttagtgcaagggttgcacgtagncggtgtaaaacctaaaaattattctaagtcttttctgtccatcttttcacctaagcttaaaaagcccccttgttcactactaaacgaactgaaaaattaatcataatcataagcaactatcctaattacatgcaagagatacaaaatgacaaagagaanagggaaagactagttgggttgcctcccaataagcgctcttttaatgtcattagcttgacgcatcatcctgttatcctgtgtccaataaggttccaacttccagaaccttcttctntagtctttttttcttcatcacattgaccttcaaacaaaca

SEQ ID NO: 301823 - DNA, 468 bp, Glycine max
  unsure (1)..(468): unsure at all n locations
agcggcnnncaacnncagaagccgagcgttgcnagnccgatagananccannanttacananncacgctggngngtaaactgggctgaagttcattttagctttaactgcagaactgcagggtagtaggaattgactgtatgcactgcaatatgtctgtatttggtactaataaactgagatctaacaggtgtatattaaacagaaaaccttctcgaggtatgcatcaattgtataacatttgacagaatagcttctctcgatgacacttaaaaacctattttaatatatacatgacctctgagtctattgcataagtacttctgtcattcttagagcactaggtccacacgaatgcgataagataatgtcgtcgaaagagatatttgtaagaatcaaggatagtttactttgtataaaggcaggttagattaacatcaaatatggccttctagaaaattaactggga

SEQ ID NO: 301824 - DNA, 206 bp, Glycine max
  unsure (1)..(206): unsure at all n locations
taatngagatagtgctatcaagatcactttcgtctttgtntttcaagcacaatagntgtttgctgcttatctactatcctatcatgagtctattcacattcttttacatgtctgttcaagttgttggttccatatttattacttttgcatttataaccttggtcacaatgcttatatatagcaacatccccttccctattaaaatg

SEQ ID NO: 301825 - DNA, 287 bp, Glycine max
agcttgaacaaattctcataaattaaaattgctttgggctcagtgagactgactcgcttgcccaggcttattcaacctacaaaggctgggtggcttaaagagactaactcgcttagccaccaacaaaagacaaaaaacatcttagactgtggcctaagaaacacaacgcgctaagtgcggcatgctgacttagcgagttcatatgacacttaaacaaaacaggaaatttaaactctcgctatgcccaaggtgcaatggcttagcgagttcatacaaacattcatata

SEQ ID NO: 301826 - DNA, 261 bp, Glycine max
aaatcgcgcataaatacaccatcccctgttgcccacctccaactgagctcacgtactcccatgtagcccatatcctctgttttctcaacaccgggtccccatcactcctcccaagcttccccaacatccatgtaattcaacattcaaacaacacatactaccacagccaagataacagggcaaaggcagaaaactgtgcccaaaacaccaaccaaaatcacggctttttctcacttaaagacccccgtaacattgccttcg

SEQ ID NO: 301827 - DNA, 428 bp, Glycine max
  unsure (1)..(428): unsure at all n locations
agcttataaaatgttccactttctaatcatgtgaaggccaaattattatcaaacaaggtgggaaaacaattatcaataacaattatcaaatgtcacagcatatttgtttttgacatgaaagtacaataagcatggtgagatccaactagaatagtgataaggcatgagagtttcatcacttgtacatgacatgtaaggggatgagatgttcatgtgcagtgtattgttgcaatgaanatcaatatttgaattattatggtgaaaatcactgtcaaactctctataataggacaacattgaatgagtcaattatttaaaatgaaaaaaaagcttgaagatgttttaacttattttacaagtctcttgataccttatctaatagctatgccatcttataaaagatcactttgatcatgtcaggccaatta

SEQ ID NO: 301828 - DNA, 519 bp, Glycine max
  unsure (1)..(519): unsure at all n locations
nagcggcacgtgtacaatangcaancctaattcatncnnnccggacttnntggangcaaatggagaattttttttcttnaatgccnccctcagggaagagggcgttatgccttctccataaaccaaacatttatgtaaatttatagcanactcatgcgcatactttcttacgaacattcactcgcacaagatatttttctaattaagagaaacgcgcccacgcacaatcaaagcgccttcgttacctagaacacttatatgtaccttcaaggtgggtttgcgacctacatcacatgcatcttctttgcgtaattataatacatgcgtactcgaagcgctttgggtaccaacaaatggctacgcgcccattctgggagtttcatacccatactcacacaacacttttgatgaatctcgtgtgcccacccaacaaaggggcggcactatatgcgcttaatacagggttttgttcctataaccgatggcgaacctgttatatttcttgttagcaaactgcgt

SEQ ID NO: 301829 - DNA, 52 bp, Glycine max
accggaccccagcacctgcagcgcagctgaaccttccatttttcaaaaaaca

SEQ ID NO: 301830 - DNA, 443 bp, Glycine max
  unsure (1)..(443): unsure at all n locations
gagagtgattcatgacccctgacatnaccncnagccaacaccggngcccagagagggaaacttgtttttntttaccaaaccaggtgtttataagaaaaatatccttcgcaacactttctaaacgaggatggggaattgtccaccaaaatgataggtaatgtttaatgaacttaaacaaccttttctttaaaacaacgtcttcaataaacttgggcaatcagactaaaaacagggaataacccatctagaaggatctgagctctacactgcaaatccgccggtatcttgggccttccaagaagagttctgcctacttacattattacgtagggcctgaaaaacaggacaaacacggggcttggctcttaacagccccaatccaaatataacgtaatgaaccaagaaccctggtgctccaccccactttgtattcaaaagcaacg

SEQ ID NO: 301831 - DNA, 377 bp, Glycine max
  unsure (1)..(377): unsure at all n locations
agcttgctactactatcttttcctttttgangatgacaacttctgagatcgagagacacacacacacacacacttgttcctagccgatcactcacataaatttccattctccccctttgtttttgaatgtatgcttctcttaaaattaagttgattactcatgtgagttcttgatttaatccccatttctctccccctttggcatcaacaaaaagccaaagtgcgtaacaagtataagacaatcatacactattaatcattcacaaggcatgcattgaagaatataaaccaatcatgaagcaagaaacatgactagatcagatatattaaacaaatcacatagtcatctaacataattcataattgttcaaacacac

SEQ ID NO: 301832 - DNA, 521 bp, Glycine max
  unsure (1)..(521): unsure at all n locations
gggagatggaagcttgagatcntcatnatcacacnngacgcaacgggancatacatgtggtacaggttttggtgtcnattgtcacacaagttggcactgccatggcgcataacccacatccctgtggccacttcaactgaactacgtactccaagtacccaatatctcgtttctcttaacaccggngtccccaattaatccctcttcaagccttgccacaacattgcaagccagaacaaaccattcanacaggcacaatgctatcacagccaagccaaacagagcaaaggcagaaaactctggtcanacaccaaccagaatcacagctgtttctcgcttaaagaccccagtaacaattcctttcgatccattcgttaaccgttggatcgactcgaaaatttaatggaaggctcttgtacataagcctacattgtgaccggtgggatctactagcaaacattcagaactcattctgcactagactttcacagccaaccaacacaagcattttcttgacttgg

SEQ ID NO: 301833 - DNA, 500 bp, Glycine max
  unsure (1)..(500): unsure at all n locations
gnnccctattaaccgagtcanganctnctgnnnatctgacacacnnangccaagcgcgacnaggnnnagnaaggagaagccaatttactttnnngactttttgacacgccggcataagggcaggagggnnttctccatctcatatcattcgcgcatcagcctcatcatgagtacgtcgaaagacaaatttctcaatttatcaaacgttcgtacgaaggctacactcttctatgtaaaatatctccaccttatcataatgcaactcactacgagtctgaggtagcgtagtataccgtttttggcacaacatcacgccccttggttgcgaaacacactctgtctgaatcaagctacctattacgaatcctgttttgtcgcgacgtgtgaataataaacaacgctctctcttgcctatcataatggatcagactccttggcgctacttcactgctttgtggaacttgcccgaatggccctgggttagaaacatttttggttac

SEQ ID NO: 301834 - DNA, 336 bp, Glycine max
  unsure (1)..(336): unsure at all n locations
ctcacagnnctttagattgtgggagcgaatccaatccttgtgttcggactctcagccacttatgatagccgccgatgatcccattactgcttcccctaagctctctatcctttcttcacgccgcatcccatgccttgcgaactccttggagtaccctcgcgttgtggtcactgaaacctcgtgcgatgaaaggcgtgatgctttcatctgatggtactcctctcatgggacagcccaactgtcttatggcgaggactggattataattaatacaaccccttgttccatcaaaggagcattaggacatacttcgcatgaagatagaatactgattct

SEQ ID NO: 301835 - DNA, 210 bp, Glycine max
attatatgccctaatctgactccgttgattagtatgacaatttgaattctggagagctgccgttgtgcaatttcgagcgtcttgatatattatgcgcctgaattggactctcgtgtcataagtatgaccatttcattttctcgagaccttccgttgttcaatttcaagcttctcgatatattatgcacctgaatcgtgacttcgtgtgac

SEQ ID NO: 301836 - DNA, 412 bp, Glycine max
  unsure (1)..(412): unsure at all n locations
agcttctccctcttttccaataaatanggggaggagggcagaacaaanaggttcaaccctcctgatagctgagaatcacttgaaattagtgagaaaaattgtttccgtgaagaaaatccaagtcgaggtgcttcctttcgtaacgcttccgagacgtttccgtgggtgatttcatgaagattttccgccgttcttcatcgttcttcgttcattcttcatcgntcttcaaccactaagttcctgaaatcgaacttttcaatgcattctatgtacccttagtgggccccacttgtttcgcatgcttttattctcatttcatttactttctggaccccctgttgatgtgctgtaataatgtatataaggcattntctcgcctaatcagaaaataaaatagaattctaccgatcat

SEQ ID NO: 301837 - DNA, 199 bp, Glycine max
  unsure (1)..(199): unsure at all n locations
cccgcgggtctctcctacacnaacccggaaggggtatagttcccgaaggggggtaagcaaaatttgaaacccctcgtttcaggcgtggaaatacccggacgctttggggggttcggggggtgattcggagatcatctgcggggacctgctggggttcgaaacgacccggcgggcctcaaggcctgcccaagggtggaac

SEQ ID NO: 301838 - DNA, 383 bp, Glycine max
  unsure (1)..(383): unsure at all n locations
agcttaatgctgtatggtttgtaaacaaacataaggcgaggcttgttgtgaagggatatgcgcagatgttcggggtagacttctcagaaactntntcttcggtttccaggttggataccataaggctgttgttagctcttgctgcacaaaaaggttggattatacatcacatggatgttaaatcagcctctttgaatgggcacttggaagaagaaaattttgtagagcagcttgaacgatttgtagttcatggacaggaggagaaagtctatcggctgaaaaaggccttgtatggcttanagcaagccccaacgtcttggtatggcagaattgatgcacatttgataaacttatgctttgaaaaatgtctaagtgagtttacc

SEQ ID NO: 301839 - DNA, 330 bp, Glycine max
aaaaaatatgcttaatgcgactatccatgctcgtttgcttgtttcaacccgtacaagaccttgtttaatctgtaaactttatgctcacttccaatcttgacataacccggtggttgttcaataaatacttgctccttcaagtatccatgtaagaatgttgatttaacatctagttggcaaatgggccatgaattttatgccactaaagcaatcatcaatctgatcgtgtcatgtcttgcaacttgagaaaaaacttctgtatagtcaatcccatattgttgcttgtatcccttcgccaccaaacgtgccttgtacttgtcaacttcacca

SEQ ID NO: 301840 - DNA, 293 bp, Glycine max
  unsure (1)..(293): unsure at all n locations
gcagtgttctttagatgtgcaagataaagtatattgcattaaaaataaatgagataagggaagagagaattgtacattcgatttattttggttcggtcacttcctgtacctacgtccagtcctcaagtgacccacttgagattttctactatccttgtcaattctttataatttctgaacacacattgngattcctcacccttgtgtttgagtttctcacatgccaagagataaacaatctcttgattacaactattgagttttattagatgaacaaaatgatgtctctcttt

SEQ ID NO: 301841 - DNA, 356 bp, Glycine max
catcaagcttttttttttgtgcatagaatgtggggaaaaactagtaagtgtcatgaatctctgacataagcttcaaccaattaacattgtttgaatgacaactgttgtagttgcaccgcaatcacatagtttgtccaccatggtatgctttatgttcctattggttatagttttggtatgctttatgttcctttggttatagctttggtggtagaatgtttaatttggagtccacaagaggaggatctccatatggtgctggagttattgctggagatggtagaagacaagcaagtgaaatggagctggagctcgcagagtatcatggcacgtatatatgaaattagcccataaat

SEQ ID NO: 301842 - DNA, 428 bp, Glycine max
  unsure (1)..(428): unsure at all n locations
cctcggggccatttcctgcgaaggcaaaaattaggacatttantttaccagngggacactactcttagaacanaaatggcatacaacctcctctcataaatacaaacatcaatgtaaatntagagcaagcttatgcgcatatttccttatgaacgttcacttgcacaagacatcctattaactaagaaaaatgcacccatatacaatcaaggtagcttcattacctagattatttacatgtacttccaaggtgtatttgttatttacatcacacacgcctccttggctgaatttacatacatgcatactcaaagcattntgnggtaccaaanactgcacatgcgctcatcctggtatttctaatacccatgcatatacaaacttcacgatgaatctngactacctacacaataaggtgctacatttca

SEQ ID NO: 301843 - DNA, 329 bp, Glycine max
  unsure (1)..(329): unsure at all n locations
agcttgtatctcttataagagaatgagcatgtgattggaagtgtgactgataatgttactcactttgtcagattgattgtgaaggaatacattaattgtatcccaatgagagtgtgatccttaaactttgagagaaatgactatcatttagtactgattcttgcatgaatctctgaagtattgactcaatgcacgatattgaggatgatgaacgccatatttgattgtgatagccacttatccacanagctgaccatgtgcttgaatgaattatcccttatacctcatttgagctgaatgaatgattgattgattgaaccctgagccta

SEQ ID NO: 301844 - DNA, 151 bp, Glycine max
taaatcctacctcatggggcatataccaaagctcaccatgcagataatcatacttttcatgtgctagtcctatagaatattgaaaagagtgttcaaattggtgggaggacttgaacatttttgattttcagactatacggctttcctaatg

SEQ ID NO: 301845 - DNA, 558 bp, Glycine max
  unsure (1)..(558): unsure at all n locations
cagggagagttttganatcttgtangcatttgnancnntcannaanntnagcgnaanacnccgggaggcnttagagacgacgagctttatgcaagcttgaaggccctgnntatcataaangcaagncgccancgcagggcgctttagcagcgaatagaccactcccaccccgaggtgcaagtaagccaacttgcacaagaacttacgagaagtctaatgggaatttatggctaccatggagcctaacccttatgagcattgtaaagcagtgctcataacgagcatgcatgaagagggcctanctcatgatgttgctaacggtggtgttgacgatgatagtaatgatgacgaagagaaaactccagagagagaaagagagagagagagagagctgtgtgtggaaaatgcagaaaaaatgatgataataagaaaaattgtctcaccgagggtggcgattcatgacggtcttatatcccacaaccacgagtcatgtagtggagaaagctaacaacggagcatgtattgagcctaccaaggatgtaccttattctttggccg

SEQ ID NO: 301846 - DNA, 434 bp, Glycine max
  unsure (1)..(434): unsure at all n locations
gggcaagtttgttcttcgttgacctttgaanacnaaacnncacngaacccnnnangagagagagnggccttttttanaaattctccaacgggaggcagggtcttcgtgaatgcacaaaccaactgcccacaataaatgattaaggattatagactgaaatcaatttattatgcgcaggccatactcgcacatcccagtctcgaatgcccaattgacatatcgatatcactgacactctctacaattatgacctactttgcaacacaccaggtgtaagaaaaaaaagccaaagatacactcctctgaacagccaacattttcatattaaaaaacgtgtgtttacaccacacccaaatgattctaaagatctcatttaccaaattaccaaatgaaaaaggttgaattaaattcaatctcctttaccaagcgtggtc

SEQ ID NO: 301847 - DNA, 408 bp, Glycine max
  unsure (1)..(408): unsure at all n locations
agcttncatcagtttctgacctctaacttctcaaggaaactttcttccttgcttgccaaggaagctaccttccttgcttctcaaggaagcttctcatgtgctagagtcacaccttccatgcttctggcatctaaagggaatatactaagatgcttttaacatattcttgaaatattccttttagattcacatgaaatgaaaattatatttaccaagtgaaatttcattaaattagtgacctaagctgtaaatagacacaagtgtaatatttgtcacaacttaaatgaaagagaaacttgtgagacacacttcanagttcaacttctctctctattctccttcaaaatncacgccacactctctctctctctttctctcattctctttctgcattaaaacatcatctct

SEQ ID NO: 301848 - DNA, 531 bp, Glycine max
  unsure (1)..(531): unsure at all n locations
nnnnnnnnccgactggcagngtcgangaacctganaacnaacnngacaanacctncctggtcatgatgagggaattatcttttnntcttnntcccannnngtganaacgccaaaagaagtcgacagacccaatgaatagaattcatatattccgaaaattcccttcttctttaaaatnacaagaacacgatgcacttttggattcccgtttggggcctcacttgttctttttctctacccttcacccaccattttctcttccatgcccaanatgcatgtcctctntcttttgttggttttccattgtcatttcgctgaaccctttctaccctaatcttagagtacaatcccctgctctctccgatcaaccattaccgactgctcaccacccattctgtcttcgtgaacaccgtcatccttactactcctagctgggngcatctatgacaatcgtctgcatgtcaccgnccctcacctcatcatcctagacctattgcgcacgctctttgcnacatcggccacttccattcg

SEQ ID NO: 301849 - DNA, 335 bp, Glycine max
  unsure (1)..(335): unsure at all n locations
agcttatctcatgtcagacaccctaatatcagcagttgcaaacaatcacagtttacttggtgccaacttaaagtggaattaaacaaggtataaacttaaagttcataanaaagttaaataatgctcaaaataggcaatcctagcttaaattntaccctatccttgatgtcacccaaagtcggcaagtacaacttatagaattcctctctgaatgcatccacaaacctaaataaagtttagaaaccatcaagaataagacaattagaatctgtttgatttgtataaatntaagggacaacaagatacatctactatattatagtattttcactttt

SEQ ID NO: 301850 - DNA, 446 bp, Glycine max
  unsure (1)..(446): unsure at all n locations
tcgactcatgaacaggggatcttgatcgtgtacgangctgcngngcatgccgtgaatctttccggtggtctccatgaatatcttanccactgtagtagcagtgtagtgcaccggaagtatccccatatgcacccctttggagaaacggtccaccacgaccaggaccgccaagggcggcaagccaactataaagttgagggagaggtcctcccaaggtctcgtcggaattggtagcggacatagtaatctctggctcctacggtggtcattcttggtctgttggcacacgatgcacgtggagatgaacaactggacatcctgcttcatagatggccagacgannattgcactgatgcgagccaaggtctttgtattctcatgtggccgccagtgggagtgttgtggaattctgcgacgatggtggagatggcctgaagacctttggg

SEQ ID NO: 301851 - DNA, 499 bp, Glycine max
  unsure (1)..(499): unsure at all n locations
ggccacgtttgtacatcgatgaaccctgnnnatcaaaancanaaccgaccccnntngtgaggtagagagggancacttctttttcanatgttctgccacccnangaggagggtgctggagggctaagtatcnaaccaccagactctaaatggcatggtttaagttttataatgttgtaataggaatgtagttccatcaggcctaagttattaccgaaacctctgagaacggaaggtaatttggaatttggcgacctcatgagacatcggttgttgggttttaggcctccttcgtacaacacacaacgtgtttcgataagagaaatgcccatatggatcaactctctagtacaacgacccgcgcttgtcttatctataatacacgtcgctgcattactgccttacctacataaagtactccattattcttttgatgacacgctttaccaaggctaatactgagagcttgacagaacagtcctggttgggccgtgcacatc

SEQ ID NO: 301852 - DNA, 368 bp, Glycine max
  unsure (1)..(368): unsure at all n locations
agcttganaaattctcantcagatagttattagtagcaccaaatatgatatcatccacatatatctagatgattaggaattgacttctataatctttacgaaatagagtagtatctacctttccataatctttgctttaaaccatacaaggctttattaagtttgaatacatgatgagggtagatagaactctcaaacctagggggttgttccacatagacttcttccttgataagtccattaaggaacacactntntacgtccatttgatataacattataccatgatgagcaacaaaggatagtaaaatgtgtatcgcctctagacgagtaacaagaacaaaggtntcactattatctataccttc

SEQ ID NO: 301853 - DNA, 547 bp, Glycine max
  unsure (1)..(547): unsure at all n locations
ggggnctcgtggacccgtcccgangacgcgcancttnattactcaacctatgccgccaacatctacaatagacctcctcaacctcagcttctattcagccacaacagaataactatgacctctgcaagcacaggtaccatccccgatggaagaaatcatccaaccctatttggtcgaaatcttcacaaccacaagcacaacaacaaccctacttttcaaatgcctgtggcccaagcagaccatacgttcctccaccaatctagcaccacagccacaacagaaacaacannacagtaagggcccctcgcaaccctcgcttgagaacttgtgaggcanatgactatgccaaacatgcagtntcagcaagatatcaaagcctccattcagagcttaacttatcagatgggacagttggctacacagttaaatcaacaacagtcccagaaatctgatagattacctttctcatctgtccagaatcacananatgtgagtgccattacattgaggtcangaaagcagtgtcaaggacctcaccaatagcatn

SEQ ID NO: 301854 - DNA, 377 bp, Glycine max
  unsure (1)..(377): unsure at all n locations
agcttgaatcggtctctcagtgtgtataaagttatgagcattntaattgctcgacagcttccgttgttcattttcgagcgtctctatatgtgatgcgccttaatctaacttccgtgtgaaaagttatgaccatttgaatttctcaagagcttcctttgttcaattttgagcgtctcgatttgtgatttgcctgaatcggacatccgtgtcaaatgttatgaccatttgaatttctaaagagctttcgttgttcaatttcgagcctctcgacatattatgcgcccgaatcgggcattcgtgtgataatttatggccatttgaatttctcaagagtttccgatgtttaatttcgagcgtatcgatatattataagcctg

SEQ ID NO: 301855 - DNA, 276 bp, Glycine max
  unsure (1)..(276): unsure at all n locations
gaccattccattctgatcataccaactttttcaaatatatcatagcacactttatgtggtctgatgctacaaggctatttatgtgactcaacacaattctaaagtcttaaacaaaaggctatctttanaagtaaatctttatctttacaatcttgccaatactggatcataggatattaatctcatgtcatctatctttcagaagatctcttcttttttatcgaaagataaagacgtgtcttatggagatttaccaagaggtgtctgggtaactga

SEQ ID NO: 301856 - DNA, 436 bp, Glycine max
  unsure (1)..(436): unsure at all n locations
agctttttatatattcgggactcaatcagactgcgagaagaagtattgtcctttgaatttgctaacgcttcngattcaatttcgagcgtctcgatatattacaggactcaatcagacatccgagttataagttattgtcgtttgaatttgctcagagcttcaacattcaatttcgagctgttcgatatattactggactcaatcagacatccgagtaanaagttattgtcgtttgaatatgctcagggcttcagtattccatttcgagcatctcaatatattacgggactcaatcagacatccgagtaaaaagttattgtcgcttgaatttgctcagagcttcagtaatccatttcgagcgtctcgatatattacgggactaatcagacattcgagtaaaagttattgcgtttgaattgtcagagcttcacattca

SEQ ID NO: 301857 - DNA, 335 bp, Glycine max
  unsure (1)..(335): unsure at all n locations
atactctctctaccatgtganattcgtgctctttatggtttatgtgngtggatctttaagcatgtagccttagctacacaaccatcaaccanactaaagcattntgaatatggctttcatgtatcttgtacgggtagtcatataatcttataggctcttagcgaggtattacactctggataatttgtaaaatattaatggatgacatcatcgaagaagaaaaattgtttgtatgaatntgtttaaattgtattttaattcttgtgcattgcaagttgcaacttaataaactggttgaatgattgaatcactcataaaaaataaaataaaaaagt

SEQ ID NO: 301858 - DNA, 451 bp, Glycine max
  unsure (1)..(451): unsure at all n locations
aggagtgagtgttctgtataccttagnaaccanaannnatntagacnccggatactctnagacgagnngangcatgcagcattttcaatatttgngggcnngcttctgggattgggtgattatttgaaacatattgcgcatgttatggtgatcgttaacaatgagataaactctgttatcatgataaaacatagcaacctaccaatttttgacatcatgatcaaaccaacaatgtaccccatcaaaccaaaatattctgccaaaattctgaaataagggtcagctcgaatgacatctatgacttgtaaacatgagaatatgtcttgattccaaggacacctcgaatggttttgagattatatggttaatttacccattcactgtgaatgctttcactcctatttttgatatcatagaaccaatctgcctacgattgaaaggcttgtactcc

SEQ ID NO: 301859 - DNA, 204 bp, Glycine max
gacgggagctagcttacacaacgctacaatctctttttatcaacggcgagaggacctcacaaatatctcagggaccaataaacgagagaactgcttaactttttaggaggcgtataactaaggagtgcaaaaaattatgacagccatatagcagataccctcaaatactcgagaacgaacagcagtcactacataaactttggc

SEQ ID NO: 301860 - DNA, 318 bp, Glycine max
  unsure (1)..(318): unsure at all n locations
gcccgagtgctctgccacntaatctagcagctgacaccatgggaagatacttttttgaatgtcgctctaaatgatggcagtagttcaatacaaccaggcaaataatttatcatgtgatggagtgtcatagctaatatcaaacattaacaagtaattgattgccacccaactcggtggattggcttactaacacaatatcaaaaaaacccttgctagtttataaagacaccttacttattccctgtacaacgttctaataatactatttatataacatttccaagcttcgagagctcataacagtctatcactatcact

SEQ ID NO: 301861 - DNA, 392 bp, Glycine max
  unsure (1)..(392): unsure at all n locations
agctatcgaatctgaatctcattctttatcacattgtctttttcgtactaaaccaaaacccaattcgctaactttntaccaaaatattaatttattaattaggaggggcatacaaggaaatatattttcaaaacctatttaggaataaatttaaataaaatacaaaatcaaatctattgtccgaagggagcgccgttgggttttctatcctaaatcctaccattttcccttttcataattctcactctccgcaatattattttccttcaaagtcattggtaagttaaagacattnnttttttataattntntgcccatanaaaaaaaataattccatgtatcgaanattgaatattcaatgtaaaccacaaccttaattgaacattatattc

SEQ ID NO: 301862 - DNA, 478 bp, Glycine max
  unsure (1)..(478): unsure at all n locations
gggagaggagagtcagagaacttganaccaaacnatagcaactnnnccaacgtgtagacgaattatttacctttagaaaactgcgccgtggacagacatcgctatagagatatccaacttttagggcacatgctacacaaggcctggcatcagtacctctcagaactgaggcccaacagacatacatatctgctaagacatacttgttcttgcaaaactacatactacaaacttttcttgagccacctgtaccttgcctagaagaacgagtgatgcataagaccctgcctaagatcgctgttcttcaagacatcaaggaccccagactgagcttacgcattcagatgggaccgttggctactcaattggattagcgcccgttccgaagactggtgatgaatctctcaatcgacataatctcaaagtggtgttgccactcgtcctagcgtgaaggtgtgcaagactcaaccaaacaccg

SEQ ID NO: 301863 - DNA, 272 bp, Glycine max
tgaagctctgataccacttgttggacaagtggcctcagatctcttaacaacgggggggttgaattaaaatattcgaaactctttcccctcattaaaaatctatcttactttttacttaagttatgaattcccttaatgacaatcttgttatatattaatccacatgaagcaacttgactatgaatataaagcactaatacataaaggagattatcggaagagagaatgcaaactcaattatatacatgttcggccacacacttgtgcctacg

SEQ ID NO: 301864 - DNA, 213 bp, Glycine max
  unsure (1)..(213): unsure at all n locations
tactcacgcttcaagaaaaggcccaactctccttagatatcatatntcatgtttaaataagtggctntgttcgtgcttgtgcgcttagcgcaattctgaaccgcttagcgcgcattagtgaattatggcttagtgtggctcttctcgctcagcggatggactaaagcggtctgtttagcgggttgacccttctctcagctaatatgcacaact

SEQ ID NO: 301865 - DNA, 381 bp, Glycine max
  unsure (1)..(381): unsure at all n locations
agcttntgcggattttgnngtctttgccagtgaaagggaaatcgatgtggggtctaanatataagggcaagtttaagtcacccttggcttggaccgaatgatgataaactggggcaacatgaagaagggtgagggatgaaggggagaagcccgtgcttgtgaacttgccatttccaatacaagcccaagtttctcaacccaacccaacaattgtcattatctcagccaataaccaaaccttctcncttactccaccgcccagttatccacaaaggccatccctaaaatcaaccacaaagcctacctaccacacttccaatgacaaacaccacctttagcataaaccaaaacaccaaccaagaaatgaattttgctgcgaga

SEQ ID NO: 301866 - DNA, 287 bp, Glycine max
ccatggtgatatctgactgaacgaaaaaaccccaatcacactcgtagcgtggattcttcagcgctccagatacgaattaatgactcaagttctaacctgctataccattacacgcttgagctattgaattcatttcccctgaatgagaattagagcttggagaaactttttcgggttctttacaaagactggcagatacaagtgacgtaaaatgacgtacgctccggtctaaacagaggtgcatagatggcattgtggacttgtattggcgcttcaatgtgtggccc

SEQ ID NO: 301867 - DNA, 362 bp, Glycine max
agcttacaacattgtcggtcatatcataagtgcaaatgcaatagaacaagcgatattttgcttccaaacaccccacattggtcgggtactcatatcataagtgcaagcctatattgctttagaaaaacattaatgcaactctatattttttctgttttgacctgagggttacaaattacatattcttcccatgatttgcatctgttgcttgcaagcctatattgctttagaaaaacattaatgtatccatttgactgtgttatcattaaattggcattgctattttagcaatcaccaatgatcttgtaaacttatagggttggttaatggtaaggataaaaaggtggataataaagttgtat

SEQ ID NO: 301868 - DNA, 261 bp, Glycine max
  unsure (1)..(261): unsure at all n locations
tcaagaatcaagatcaagattcaagattcaagactcaagaatctagagaagacttaatcaagataagtatgagaatgattnttcanaaactgagtagcacatgaatttttcacaaaacatgtttaccaaagggtttttactctctggtaatcgattagcaaattgctgtaatcgattaccagtaacaaaattgttntgaaaaagttntcaaattgaatttacaacattgcaattaatttcaaaagttgtaatcgatacaat

SEQ ID NO: 301869 - DNA, 213 bp, Glycine max
caactgacattgcgcttggcggccgcgcttaacaaagtattttctacacctactgttcgttgatttgaccaatgctgttatgggaatgtttcgacaatccttcaaaaccctatggatacattctgaaaggttggttgtcatgttgccatatcaacgtccttctctatcataagccatcgtccatttttactgttgaattcgatcaacccatgt

SEQ ID NO: 301870 - DNA, 533 bp, Glycine max
  unsure (1)..(533): unsure at all n locations
aggggaggagccagggttaganngtacctntctnatctcanacnnntacacatccngnnntccnnctcagtcatagcaacttatctttctcagcttttcaggccaaaggcggaaacctctggccaaactcaaacccaaaatcacagctttttctcacttaaagaacccagtacattttcttcgttccaatcattcaccggtggaatgacttgaaaatttactggaagttcatagtcataaatctacattttgaccgtcgggatctgctagaaaatatccaaaccccatatgtactaccctcttcacaaccaaccatacacaagcatttttctgcacttatacaaaaatcttgctgacatttcaacagcaaaattctgcataaagtgcagatgtcgaagaccactctngccttcatccaatnttgcccaaatcgaatnctacatgtcccaaatcatgtttcaatcatgtctaaccaatgacaagcttcagactatagcaacacacaatctaggtatccaaacctctcattaatg

SEQ ID NO: 301871 - DNA, 291 bp, Glycine max
  unsure (1)..(291): unsure at all n locations
catcgaatatcccntatatanaccgaccagaggnaagggaaaatttatttacccccgcccgggagggtatggcgaaaacctccccggtggccaaaccaacacttattacgtcaccgccgttaagaaacggagctaaaacacctgcacccgtcagcttcaccagcgaactaatatgaaccgcattaaaacggcagcttggcccacaagcggacatccctaataagggattaatgttatataaatgggaccccaccgagagtagatgcggcttgcggccctttaatcacggcc

SEQ ID NO: 301872 - DNA, 281 bp, Glycine max
  unsure (1)..(281): unsure at all n locations
gagagtaatatgtgcaccncacaacnaacaccgaccagaaggggattatttactttcaaccggggaggaggaaaacccaaaggacccaaagccaaccgcacagggaacccgccaaaaaaggagcgccacccaaaaaaccaaagagaagaaaacacgaacacgcgaaaccacgcaggggaaaacaggagaacaggaagaagcggagaacgcacagacggaaaaccaaaagaccagcgggaactaaccagccggaagtggaagaagggccggcaagacccgcg

SEQ ID NO: 301873 - DNA, 372 bp, Glycine max
  unsure (1)..(372): unsure at all n locations
agngggaattattatctatttacttnnactcatnnatntattgattttatgtattataggagaacttaaaataaacacggttgttacagtaatcaattacatatccatggtaatcgataattactttgtaaatcagttataaaactgttttgagcttctggtaattgattactagagagtaaaaactttggtaaaagatttttctttgaanaattcttttggacaaattgtgctattcaatcttttctttgaaaaattctttttatacttatcttgatgattatcttgaggctcttgcatatcttgagtcttctcttgaatctcacttgaatcttcttgatttctttaatcttgtttgaaaaatctttggca

SEQ ID NO: 301874 - DNA, 520 bp, Glycine max
  unsure (1)..(520): unsure at all n locations
agggcatatcaattcnctttctttgtaccgacncntanattnatcaacntncctannaacatntcatgccgggggaccttcttctagtattcatttctacagcatcctccaacccctttgccttcccaactagagcaatcccaaccaaanaattgggaaaaaccggaaagggagatctttgagaaccttcaggaaggtganggtgacatacctctgctagatgccctcagcgaattccagataacccaagttctaatgagtgtgcaccataaaagaagctcaaggcaataaaaggattaacatggcagatatgtgtcaccttgataggaaatctgttctcacattcctgagaaatgtanggaccangtactttctgtataccctacatttatngngaacaatanatntgagaatgctttgctagatctaggagcatcagttagtgtcatgcctctgccatttcaatcttatctttgacctttcatctacaatggggatcatttgcaatagagtgtgctcn

SEQ ID NO: 301875 - DNA, 296 bp, Glycine max
ttttttgccaagtattcagactagccttattcattttacatttctagcctgacaaatcacactctatcccttgcaaccacctctgcaattattttcatatcaactgctgcttgaactatggactgaactcctacttcagttcttggtgtgggagacttgtttctgtaaagcaaaatgatcgtaaacctgtgatcctgattttccatcctattttaaagcggaatttcacataatttcgttctgatagatgattcactagatcagcaaaataaaattgttggtcaatagaaccttac

SEQ ID NO: 301876 - DNA, 162 bp, Glycine max
agcttgtcccattaacacgggggggttttcttgcgggggcgacccccccttttaaaccttcctgacggcaaaatacgttaattttgtcaataagctctctggccgattgctccttagtctttgcagtgatgccccggctcaagctaataccgacctttccgc

SEQ ID NO: 301877 - DNA, 260 bp, Glycine max
agcgtctcgatatattacgagtctcgagtcaaacatccgagacaaaagttattgtcgtttgaatttgctcacaggttcaacattcaattttgagcgtctcgttatatgacaggactcaatctcacattctagtaaaaagttattgtccgtggaattggcttagagcttcaacattcaatatcgagcgtgtcgatatatgatgggactcaatcagacatccgagtaaaagatattggcgtagaattgcgtacagcttcaca

SEQ ID NO: 301878 - DNA, 551 bp, Glycine max
  unsure (1)..(551): unsure at all n locations
aaaggtggacggaatgcgatagcancnccgcgacactctacaatacnnaacactngagatcanngaagcgcnngaanaggagagacatcgctgtctcattttgtcgaccatcagacgcggcaccctgggagatagtgtcgcggggagtcaaagagacctttgnggaccgtcanggtgggtgtgctaattgcccataaccacagctgtgaccaatacccgacccaaccccgggcataggctggtcagtgagaacctgtgatgtacctaagcacgcgagctcctngcagtcaactgattaaaggaacaaagaccacaaagcacggaggcttgtggtggctggccaactctgaattttgtgtgatatgtggattatggcctctggtgatcgataccaagggtgggaatcaattcaacggcttaaatgacacaggagactagatgtctctgtaatcgataccaggggcgtatcgatatcatcttgatacnaagtcatgaactaatgacgctctggtatcgattccacccagtgcatcaatacacagagggatggg

SEQ ID NO: 301879 - DNA, 289 bp, Glycine max
  unsure (1)..(289): unsure at all n locations
ccatttcctagttaaccatgcattaggtaccatgttcaattattttgcttttaagtgaaacgggcttatgatcccaacatggttggctcgtggtgcctaacacatgaaactaagaatgtagtgtgaagtttcacgcttcccccttnttttgttttgtcttgtagaggagaatgcaaggatgagcaaacatgaaaaccaatggtatgcaattttgcagatcaaaatagttgttgaacgcatatgcctgatgatgccatgactcatgcaaaatgtgacgccggaatatgat

SEQ ID NO: 301880 - DNA, 525 bp, Glycine max
  unsure (1)..(525): unsure at all n locations
ggcaatctttctgaattgcatgncncnncgcnanncatcnnatnnacncnaactcgaacgcnannngcangcagaggaggaggaggaagtgaattgttctntctccnanacaccgacgagaggcgcgggtgaagcgaattgcactcacctacagagcacagaccggacctgagaccttgcatacctcaacgcagggcgatgggacaatacaaatgctatgctgcaaatagcgacaatagacatcatccaccgtcgatacggaatcgaccacgcctgaacagatgcgcaccctcctagcaaggataccaccgtcgaaagagaataacactgattgggaaggcgtaccctcataacagacaaagaacgggccccttcttccaaatgccgtaggtcctaggaaccataatttcttaacgctatgacaacccaatagccctaatactgcaagcgtggagcgtttccacaacttccttaagaacttggtaggcacagcgttgccaacatcgactacacaagaaccaaccg

SEQ ID NO: 301881 - DNA, 550 bp, Glycine max
  unsure (1)..(550): unsure at all n locations
gggtnncngnggcgganagtttgatcgatttcctttacnttgcacaatcaatnaannacaannncnccnnnnggnnagaaaggngaggagcaaggacgtattacnattcttccangacaacnacacgcggcggcgagggatttctagattgancccaccacttcacgatcaagcctcatttcaagttccctgaccagaacatatgaaggatctacactcgcgagaggggtggttgccacattccagagacgatgcagttcccgtttcatacaccaaacgcggaggacttcacatcgcgggtattcgacagactcttacacggctcacatagcataggtctggtctgcgaaagagtttttctgtaaactatgtgagttagccacattcttcctctttcttatcgatggccggaggcccctactttatcacaactttccgttgggtttacccttcccacatggttcgacccggagtattcgtacccacgggctcgggatcgactccccgcgcatttatctatgggctctgacccaattgcgaccactcagcc

SEQ ID NO: 301882 - DNA, 494 bp, Glycine max
  unsure (1)..(494): unsure at all n locations
gcagaatttgtgatctatacnncttganacacaancnnnattaaacacngagccnnggagagaaagaaagttatttttccactttgagcgaaacggggaggagatgggaacttttctaatactagaaacaatgatggtcccatttcaatctaaagtaatcctaagctattcatgtaacctgtcctgggctgccagcaagnggtgaaatctgtgaagtacccatattccactgctatttagactggtagcgagctgtggagccgcaaacacactcgaatttttgctaaggtgggcggcaatccataaatatattggaggttgttgttctattttcatacgaaacgagattcgagtagttgggctatatctcgggtctacacttctaagatatgattgggtcgtgatactttcctaaaggtaatctatactgactgtaccaaacctccatcacttggccgaggggacttactcactcgttttaaacataataaacg

SEQ ID NO: 301883 - DNA, 354 bp, Glycine max
  unsure (1)..(354): unsure at all n locations
cagtagagcctagacatganacnacacnaacaacccnggcgcggggggggggggtggtgnccactcccccccgggggggggggaaaaaccacaccccccgccgcgaacagaagcgagcgaacaaaacagagcgcagggcaaaccggacaaaaaagccgaagcacgcaaacacggggaggacgagcaagacagcaccagcgggagaaacacaacagggaagggacagagaacggcagacgcgcggaacccaaccacggcacaccacagagacaggcccggcggaaggggacaaaggcacgcgagggccacaacagcagaccccaccacgccaaaccgcaagggcgagaagagggc

SEQ ID NO: 301884 - DNA, 363 bp, Glycine max
  unsure (1)..(363): unsure at all n locations
agcttttggaatatatataatgtgataactntacctagtggttttgtaaagctcaaactgtgaccaaaaagcactggatgagaaataatgaanaacaccacaactgccaagggatttcataccacctcatctcattttcttgctcccttccttgtcacccaataaaaataataaaaatatgatgtatggntgaaaaataatgttaattntatctgttgaggtgatcatttntcttttggagaggaagaaggaaatactctaaagaaacaggtaattntattacatcttacaacaagaatgcangtttcccattggtttatcanaataattttctaattattttataaataaaaacattattga

SEQ ID NO: 301885 - DNA, 397 bp, Glycine max
  unsure (1)..(397): unsure at all n locations
gccagagtatgcatgattcgaccatnatctcagctggaaaaaataaaggttcgggttaagatgttttctctccactctgngngaagcgaaaggaaagaccatgttcgaaccttgagggaaagtacatggtgataggtttatactatatctacggccaggtggaccagttggagtgcctaaattttcctggtttaaatgttgcttctggtatgaaagctctgatttaaaataggctgaattcaaattatctgtttttttctctttagaataataatgtttagggctatatacaagctccgtaccttatggactgagtgtgatccttatgaattcatataatgactgcgtgtgacttcttgctacaaagttgctcactatctgatttcatcatgcncaa

SEQ ID NO: 301886 - DNA, 286 bp, Glycine max
caccactggacccggatcttaagcactgagctcagctgaatattggttaagggacttctgtttattttgcccagatggacctgaattgttggggcagaacctgggactagtggggtttgccaaccacttgacatccgacccccgcatatcgtcggaaacttatgactaacagcactctgcgtcacaataagacaaacccaacaggagttgggggtgcactgaatttgggaattggtgggcttggatcaaccactggatcatcagctaaatgaacagagtaatgctt

SEQ ID NO: 301887 - DNA, 546 bp, Glycine max
  unsure (1)..(546): unsure at all n locations
nntacggaaagtcccgacngcatgncgtctgcnatctcagcctntacgaacanaatggcctcattcttttccaaatatgctggttgaattttgtacgcatcaacaagaatcaagcccaggctattgtgccagcacatcatgggggcaaacacaccaaatgattatgatgatggatggctccaattctcacaaaggtaaatcattactttccaattgagcctttcaaactatcatgacatgtagaagagaatcaaggatttcaagtcacaaaatgtcgagaacttttattnntcaaacaattacccatttctttgacatatcctataattcanagaanaacatgcanattcgtacgtgcacacaaaatngaccgcaaatattaaactaaaaatccgacgaaactaacaacattaacaanataacacaactaacagattaacaanaccaacaaaactagccaaaccaaagaacacttcccccccccccccatacttnaacaacacattngtctcaatgtagcacaatttanagaataagaaccattan

SEQ ID NO: 301888 - DNA, 365 bp, Glycine max
  unsure (1)..(365): unsure at all n locations
ggatgtctagctagagctcaccaaacacaacgcagccgccnngccaagaggagagagataattncccacaacccagcagaggcggtaggggacacaacaacaccccgggggaccgacggcgaacaaaaaacagggggcagacaaacagggccaaaacccgcggcgggccccaacagcggcccagaagaaggcggggagcgacaaagagaaacacgcgcccgcacgaggagcaagtgcgggcaaccaacacgggaggccacaaccccaacaaaagagggacggaccgagggcgggagcaaccggaaacggcgggacgaaaagggcggactgacgcagggccaaacgagagggggcaggcagaaggc

SEQ ID NO: 301889 - DNA, 401 bp, Glycine max
  unsure (1)..(401): unsure at all n locations
ggagagcgcatcgagcnnccanaccacaccacacgcccagggccgagagggggggtgtcttcggcttnncccgccggcggaccaggagaaaaccgacgccagaggcccccccaaaggagcgcgccgggaaaaccacaccccagacagccccngggagaaaccacaaggggaaggacagggctgccaaaccggacgacccccgctactcgcaaaaggacggcccgcgggacgaataaacaccgcgcaccgggggggccgaagaaggacgccaggcggagacccccgcaccgggcccacgcagacaggaacccccgtcagccctgggggccggagcaacaccaccccccagggggagcggccgccaagagcgaaaagggcagaccgccagggccgacaagggg

SEQ ID NO: 301890 - DNA, 137 bp, Glycine max
  unsure (1)..(137): unsure at all n locations
tacagcagtaaattggaggggagcgatccttgtgttctgactctcaaccacttatgatagctgccgatgatcccattactgctttcnctaagatctctgtactttattcaaaccgcattgcatgccttgtgaactcc

SEQ ID NO: 301891 - DNA, 477 bp, Glycine max
  unsure (1)..(477): unsure at all n locations
gcgacaacagcggagaggtttttgatatgatacccgcacaattatanacnaccnnnncccnnnagannngnctgctctgaggacaacacgttttaactctccccccgcacgggcggatggcattgccagattagatacgtcgagaacatcttgnattgcttatggagtatgcttcaagccgaagagggattaatagacaactgccctgcttctgaggtggaaagaagtganagccaggatcacccgagatcgatgacgttgctaagataaatancgtgaaataaagaatggaaccaaatactcattactgctgaaagaacaacatggggagaataaatcttgtccagaagttatccttccaaatcttggaggaactcttctaatataagaaaccttgggaggaaaaccacaaccaagttgtctgattctgattttgtcattcatcttgccaatcttgtgtatgttaatatttaatcn

SEQ ID NO: 301892 - DNA, 493 bp, Glycine max
  unsure (1)..(493): unsure at all n locations
nnccccgagcaggtccgaagtcnnccntnnatacancncacgcagacannncggaggctacaggagagnngttagtttttccgccgaccacccctcgcggcgggactggaccggaaacacaccatagccaaccgcgccacagggcatgccgatcgcaccgcataccgatctagaacgatgggtgatcaagatgagacacagcatcagaagacagccgacgaggcngcgagaaacaacgaaaggccccacgacagtgcactgctaggaatgagagcacgcagcgcaaagacagggccacagcagccgttgtaaatgcagatgccgaatctgacgcacacacaatggggaccgcgcaccagtcaccacaaatcgactaagctgcgaaagaccacatgcgccgatgcagcctcccggcatacaccgacaggcacccgatggatgccgccaccaccgcaacaacctggnacgaagggccaatggaacccacctgaac

SEQ ID NO: 301893 - DNA, 147 bp, Glycine max
  unsure (1)..(147): unsure at all n locations
gtttatatangcacatatgtgagaaaaactaattgatataagaaactagctagaagggaaattagaaaagtgatcgatatagctgtgattttgtgtttgtatgtggccacatgagagagagagcaatgatgacattggagtcatcat

SEQ ID NO: 301894 - DNA, 492 bp, Glycine max
  unsure (1)..(492): unsure at all n locations
cncaagcgagttgatganttcatgacantcttgnacacnacatanacncaagctagccacccanatcgcccaggagagcacagctcgccttgcatagntgggttgcttcctcacgaggcagcggtctatttgaggattatgtgaggaaggcccaacagtgctctgtctgttatgtgcacccacatgatcactaacacacccctgactactntgagggagaactctttaccagagagtgcacgcgctacaaatttgaaacacaactttatcgctttacagatgttcagaacactgctgatgattatatgatcgtatttgactactgccgtttctgacctcactaagagcaaagagcgtcataacattgacgcgagctctgaaattatatatgagcatcttttggatttgattgcgcattccttaatataaaaaccctatgtggtgccagctctaaagacatacaagtggtgtattacatagaccgcgatgagg

SEQ ID NO: 301895 - DNA, 351 bp, Glycine max
  unsure (1)..(351): unsure at all n locations
agcttttcatattcttatttggtggctngaattaccttacacatacaaggcttgatatagctcgtagtgtgagtgtagtttcaagatatttgcactctccaactaagcaacacttatgtgcaacaaggagggttcttaagtatgttgcaggttcaatcaaacttggagtactttatgagagtgtggataatttcaagttggttggctatagtgatagtgattgngtagggttcttagatgataganagagtacatcagattntgtattcagtcttggcttgggagccatcacgtagagctccaagaagcaagacacagttgctttatcatcatctanagtngaatatgtag

SEQ ID NO: 301896 - DNA, 419 bp, Glycine max
  unsure (1)..(419): unsure at all n locations
tgcatgttcctttttgttattgtgtgtactntgactacgattgctaaaagaacaaaatgcaatgagtaatgcgacaacgaattaaacatgaatgcatgataatgataagttgttaaagtattgaaaccacatagaaatttcagcanagacatagggttgaatcacatctcattntcattaagagataatattgtttatcttgtcaaagccaaagcataaataaatacaaacgtcttagcggttcctaattatgtgggacatcaactcgatcatataaagacaataatcgaaaagcccatgaacttcctcaggagccgagtatacatccgccattgcctttgctctggctaacagccttggaagctcttgactcccattcagagtgaaagtgaacctatccatccacttcataacttctc

SEQ ID NO: 301897 - DNA, 462 bp, Glycine max
  unsure (1)..(462): unsure at all n locations
agcttgtatatctgccactggttcagctccaacactaaccaacagcactgcttccatcaccaaggcagctgcaaaaatgaacaagaggggcagcttcttgtccattntcggctctaacagagaatatcaacagttcaccacaacttggacgtaaagtagtgcctccactaaagatattggtcacctttacaagataccaaagtgttgaaataacgaaggatcaattagacaattaataaacacgactacaggagtgtnttccttatatacgcaaacttgaaccaaagacaatngtgtatgtggcttgtttgtatgtaccgtgtgcattttactaagattatgctaagtgtctgttgagtcaaaatatgcacctcgtgtaatcgtgtctgacatggacattaaccctattaacatttntgtcattcgcctactcgattggtgtttcttaatgactataacaaa

SEQ ID NO: 301898 - DNA, 240 bp, Glycine max
  unsure (1)..(240): unsure at all n locations
taatccgaggcttactagtgttgccttatgcncttttggcnganaaacagtatgatatttaatgatatgctgatacttacagtcagaacaatgagaatgagatccttgttacgctntatcttccagacatttatttccctctctactatccacgagactattgcactaaagatggctcaagtaagttataataagaaacactttcattggttccggatatcgctccacggtttctttcta

SEQ ID NO: 301899 - DNA, 461 bp, Glycine max
  unsure (1)..(461): unsure at all n locations
ttccctgttgtttctttgagaagctntctcaagaggcttctttgagaagctagatccttatctacccacacccttctattaactaaattaacctccttgaaaataattacggataaaaaataacataacaaataatcaaacatcaaacataattactaatatatatatatatatatatatatatatatatatatatatatatatatatatatatatatatatatatatatacatatatcagggtgtgacaactctcccaccctcttagaaatttcgcccttgagatataccttactcaaacaaggatgggtgagtntctcgcatctgactntctaattcccacgtggcatcttcttctgatgcaccttcccagatcacctngaccaacganatctctntctctcttaggtgttgtgtcgcctattctcgaccctcaaaggcaatgttatatatgtcatatn

SEQ ID NO: 301900 - DNA, 294 bp, Glycine max
  unsure (1)..(294): unsure at all n locations
tatcgtaatcgattacaccagttattttgagacaatggctatgttatntaggagtctctgctttaattgattatcatgtgatataatcaatcacttctctttctataagtgtaacagaagtgaacaagaacactntagtcgattactttgagtatctaatcaattacagtgttcttgaaccgtttccagtttttgaaagaacactttaatcgatgtaaaagataatctaatcgattactttattgaattatttgaatgagttaggatcacttgccgatattagttaaagaaaga

SEQ ID NO: 301901 - DNA, 431 bp, Glycine max
  unsure (1)..(431): unsure at all n locations
agtctagtgcttagtatgacttcttgataccagtgatcctaaattagttagatgccaactgtaggcaatgtaatgtactacagttcctcttaaattnttctgctgtaagttctatttgtgctaaatttatttaggttatttccaattgcatgtcagatttaccccggatgcctcttgagatgagatatatagccatggacttagttgttgagtctaacagagattatagcctaatagaaaaccatataatccatttccttcggngttctgtgagaattttttntggtttgggttcttgtccaagtaaaagcgtataattatagtttgctttggagttcagaagatantaggaagatagtattatcttntttctgaatttgctatctcttcttattcgataggatttggtgaacctaccttcatatatccat

SEQ ID NO: 301902 - DNA, 508 bp, Glycine max
  unsure (1)..(508): unsure at all n locations
aaacccaggaaaagggctttgaagtagcntnttanactctangcctcatgtanaccatggatgaaggataatctaaagtagttattattataatttttttacctaatntggggtggaaatgaatatattcctaatattaatttcaaaaccattcaatatatatatatatggttcaataaaattgctcttggaccacaatttttggtaatttaaaaaacaatataatttgaaataacttctaatgggatatatngattcatatttcattaagttactcttaggagaactgagatanaataataaaagtaaatataatnntattctatatantatatattagataataaattatatacaaagtattattagaaaatgaatanatagatctaaatggtataaaggatatatacattcttngagataaaatcatataaacacatggtagagatatattgggtaattcgcgattatattattattatatattatgataattaaatttcttatn

SEQ ID NO: 301903 - DNA, 276 bp, Glycine max
  unsure (1)..(276): unsure at all n locations
agcttataaatatctaaattattatnntaaataaatatttgtttgatagattagatttaaaaatataattgtcaatgatattntatatcattntatgttaaaagagataaaaatntacatgtaaattaagatattttntatttatcaatatatntataacgaatgttctaaaattagagattgaccactcaactaaagttgattaacatagagataaaagtaagtgttatgtgtacattntttaagagccatataagaataaagtgaaattgacat

SEQ ID NO: 301904 - DNA, 544 bp, Glycine max
  unsure (1)..(544): unsure at all n locations
aaaacagactgcatcggctangatgatccantcgaanacacacaagcccgaantgaggaagngtagaagggtgagacattctggctttatttcgttaccacatagctgntacctgaagatatgntgccggtggtcaggatacccttagcgacctcaggtggtgttgctatttccacaacccagcgtagaccaatcccgaccaactcgggcatagtcagtcaatgagacactgtgatgttcctacacaggcagctcctggcagtcaactttataaatgaacagagaccacaagccatgacgcttgtgtggggctggccagctgtgaaacttgattgctatatgggatgtggcctctggtaatcagataccaatggtggcgaatcgactacaatgctttatattgtgaagacatgaagctatgatggcctctgggtatcgactaccactgggtgaatcgattaccaccctgaatatgngatcatgaatctaagaaggcttctggnagccgatcccaatgggtagaatcattatcaggttaggaatg

SEQ ID NO: 301905 - DNA, 285 bp, Glycine max
agctaccaagtttttagttattcctcaaactgcctaagcgagcgggaaagtctataacaacttccgttgcccatcggtttggggtgaaagtggttgaacaaacaattaatgcccaacttctccacaaagcctccgaaacgcatatatcaagccgtagataggatgcctaatttaatggtgatgttttaagggctctaaatcagatcaaatgcgccatgtcccatcttttatggatcaaatcactggacaacacaggactcatctatctctacccaactttgctat

SEQ ID NO: 301906 - DNA, 627 bp, Glycine max
  unsure (1)..(627): unsure at all n locations
ggggnnnccgcaggtagttcatttttctattgtacnnnntcnnnnanaanattcatnnnacnncnacggnnanncacaannnnngagcanngaggggaaaaaagagagcanggacgnatanactttancgcnccananccaccacacganacncgggcgagcggggaaaccagcaccaaagaaaacgagaaccnccaaacaacgagaaaaacccgacgcaaagaacgagaacacaagngcgcccaccccggagncaaaaaggaaaagggaccgnngcaaancacaaccaagcccccgggcgcgaaggagcacagcagccacgaacaaaancacngcgacgcacaanaggacaagcccgaccaagaagaggacccgcgcganaggaacangcncagaagcccgaagaaggcaannnccaagcaggcccgacacacaaccagcacccaanccggacaagccgagncgaaaccnaacgggcgcgcaaanncagcacagaaccgcccagcaaaaanacgagcggcacgacacaacccggacccaancagaccacgaannnaaagnganaggcgncgggaccgcgacgagcacccgggncggccacgacgacgcaggcangaccgcacgccg

SEQ ID NO: 301907 - DNA, 337 bp, Glycine max
  unsure (1)..(337): unsure at all n locations
agctntncactcttatgtctgnattaagcgcataatatatcgagaanggcggaattgatcaatggaagctcttgagcaattcaaatgatcataactgttaactccgatgtccgattcacgcgcataatatatcgagacattcgaaattgaacaatggatgctcttgagaaatacaaatggtcataacttttcactctgaggtccgattcagactcatcatatatcaagaccctctaaattaaacaattggagctctcgagaaattcatatggtcataactattcactcggacgatcaattcaagcgcatcatatatagagacgcttgaatttaacaa

SEQ ID NO: 301908 - DNA, 544 bp, Glycine max
  unsure (1)..(544): unsure at all n locations
gcaagcaggtgattcntccttggtacttgcgacacttaattactaagcttgcatcgtgcttttgctagcggaggaaatatgactaccatggctatgaccaccgagagcanagagnggagccgctganggactacaaagctctctcttgtcaacatacgatcggtgtagaattattagccagcttgagcgcgaacttccatagaaacgttcagatcgtcaagatatcctatgagctaacagtgatgcactcctagccgatctatgtgtgatgagactccataggacctacgggagcaaagaagtgagattggatttacatcacacacgcctccgtggctgaatatacatacctgcatacttgacgcctgtatgggtacctcaaacgatacgtgctgacatcttggatattttaagagccacgcgtagtcaaactggaccatgacacattgctatctgccctagattgacgctcctgtgaagcgttattgacaattgtatgtctcctaaagccccggcggacaaaacctaggttcctttattgaaa

SEQ ID NO: 301909 - DNA, 346 bp, Glycine max
ggagaatgtgaatgtatgtatacatgattctgatgatgtcaaaagaagaatcacacaagactcattttgcttcaagattaatacaagattgtttcaacaaacaaagcctcgattcaagatttcttcaagatcaagccttgcctcacaatgaaaggtttcatgtcattcaaggcacatgtaatcgattaccaatggtttgaaagtgtgtaatcgattgcacatcatatgtaatcggataccagagactctgaacgttgggaattcacattgtatatgaagggtcacagctattcacgactaataactgtgtaatcgattacactaattctataatcgattaccagag

SEQ ID NO: 301910 - DNA, 196 bp, Glycine max
  unsure (1)..(196): unsure at all n locations
atgagaagctagagcttanctacataccccctatagtagctaaactcacccctatgccagaaaacatgacaatataaaacaagtgcctactacaaagactacttccaatgaatgtgagtttattgcaattacacaatcacaaaatgggcctcaaccttggtggggtttctctctttggtgattcactcaatatgga

SEQ ID NO: 301911 - DNA, 364 bp, Glycine max
  unsure (1)..(364): unsure at all n locations
agcttgtaatattaattctccttcagataacctctcttaggtgagaggccatgaatggttntatatctaacgcaccttgtaagcaaaagaatctccagtttgaagtgtagacaatgcacaaacccaatttactgtatcctanaatttactntaattatgaagaacggtggtgacaaggattgaattcttgaccacttggtcgtaaaatccttggtaagagccaactcttctaaaagtttaagctcttaggtagaggtttattcatttgtagcactaaatgatgtttataagtcttatttatggtgcatatcgatgttggtaactacataccgaaaacttgatttggtgcanacattcttgatta

SEQ ID NO: 301912 - DNA, 294 bp, Glycine max
acattactcttagagcaagatggcgtataacctcctcccataaatacaaacatcaatgtaaatttagagcaagcttatgcgcatatttccttactaacgttctcttgcacaagacattctattaaccgaaaaaaatgcacccatatacaatcaaggcagcgtcgttacctagattatgtacacgtactctcaaagtgtatttggtacttacatcacacacatctccttggctgaattcacatacatgcatactcagagcatgttggggtaccacaaattgcacatgtgcacatc

SEQ ID NO: 301913 - DNA, 347 bp, Glycine max
  unsure (1)..(347): unsure at all n locations
agctttttgcattttctaacgacaataactnttaactcggatgtgcgaataagtcccgtaatatatcgagacgctcgtaattganaactgaagctctgagcaaattcaaacgacattaacatttgactcggatgtccgattgcgtcccgtaggatatcgagacgctccanattcagaacggaagctttgagaaaaatctaacgataataacttttaactcggatgtctgatcgagccctngtatatatcaagatgctcgaaattgacaacggaagctctaagagaagtcatacgacaataacttatgacttggatgtccgattgtgtcccgtacgatatcgagatgc

SEQ ID NO: 301914 - DNA, 354 bp, Glycine max
  unsure (1)..(354): unsure at all n locations
gatggagaatacgatttccatggcttttctgattttgggctnggaccctttgagtgtgaagntgaaacgagacaatgatnggggactntcgaanacagagttctttgatgaggttggaaatggactttatttggatacagatgttgatgagtatgactaacacanttaattggatcttgaagaatccatggtacccaacttcaattcatttgtaaggaaggaatgtagcgatggtaacctgaaaaatgcattggttttggttgaagaaatgctttgttggggacaagaattgctatttcctgaattnntcaaattagtgagacaactttgttcatctctttcacaaatcaagtc

SEQ ID NO: 301915 - DNA, 312 bp, Glycine max
tttaattgaaccaaaatatgtacgcttttattattctttgtattgcaaatcatggggatacaatctttattttgtaatgccataaagccacttgtatgttcttcagtagacattgaagtacaggttctatttttctcacaattttcattgaaaaaatctaccgtttaagatttaacaatcattgattattcaatgagtaaaatcatctatggagctaagataatgtatattgaaatatataagttcaacacttacagttccaatgattggagtcccaatattaacaattattaaagtcaaatcacacaactc

SEQ ID NO: 301916 - DNA, 390 bp, Glycine max
  unsure (1)..(390): unsure at all n locations
ctcagctatacaattataataaaagaacaatgacaatngaatattctatacatgtttcctttgatgagtctaatgccattcttccaaggaaggattttctaaatgatatttcagattccttagaagatacacatattcatggaaatcattctaaagaaaaagacgaaggaagaaatgaggattctcaagataatggggctagaggaaataatgaacttccaagagaatgganagcctcaagagatcatcccctcgacaacattattggtgatatatcanaaggggtaacaactagacactctcttaaagatttatgcaataatatggcttttgtatctataattgaacctaaaaatataatagaagtcatagtacatgatacatggatca

SEQ ID NO: 301917 - DNA, 332 bp, Glycine max
  unsure (1)..(332): unsure at all n locations
agtatcctttatatgctttgtcttttatttctctaaagtaatgatcgaatatgccaaaattatcctatgcgtagaaaacatgtgatttcttctcaaaaaaataaaatcacagggttagctcgcctaggcgagcataccctactcaaattagttaaaaaagagggggggagggtgagtttcttcacccaaaacttctccctttcactcaagaatgccatcacccatgggactggccatccttcactcctagttcaccattcttttgcgtttccaatcccattntgcattgttgatcgtccccaacaagtaagttcctcattcttggtctctct

SEQ ID NO: 301918 - DNA, 218 bp, Glycine max
  unsure (1)..(218): unsure at all n locations
gacacatagaaactcacgcttcaagaaaggcccaactctccttagaaatcatatntcatgtttaaataggtggctntgttcgtgcttgtgcgcttagcgcaattctgaaccgcttagcgcgcattagtgaattatggcttagtgtggctcttctcgctcagcggatggactaaagcggtctgtttagcgggttgacccttctctcagctaatatgcac

SEQ ID NO: 301919 - DNA, 328 bp, Glycine max
  unsure (1)..(328): unsure at all n locations
agcttggttctttctacttacccgttgaagatcgaagaacgatgaagaacgaatgaagaacgtcgaagaacggtcgaataccttcgcgaaattcctcacggaaatgtttcggaagcgcctcggcttagattntcttcacggaaacaatttttccaagcaaattcgatagagcgagaagtgcctaaggggctgaacccttttccacttcacttcctcccctatntatagcaaaataggggagatgcttgccgcccagctcgcccaggcgagcanggttgcttccttcagaacaacagccttctggaggaatcttctggagggcccaagt

SEQ ID NO: 301920 - DNA, 283 bp, Glycine max
  unsure (1)..(283): unsure at all n locations
ntcaccagatcatataagataaangcattctttcatctgttatatatcctccacaatgtcaaattctctgcctatatattcaacctttccatcactggcacaggagtgaatcttcctccatggtgcaatattaaagttatattgtcatccattcctcacaatcagaaaccacanacattgccatatattatgaaataaaaaacctaactcatactcaaacataagcacatcacacaacaacatgcaatgtcatctattaaaatagagcatcatcaatgaaaat

SEQ ID NO: 301921 - DNA, 415 bp, Glycine max
  unsure (1)..(415): unsure at all n locations
agcttcctctgtgtcatttcctgcgaaggcaaacatttggagagttagttntaccaagaaatgctattcttaaaacgaaaatggcatacgacctcccccaataacacaaacatcaatgtaaatttagagcgaactcatgcgcatacttcctttcgaacattcactcgcaccagatattcttctaactaagaaaaatgcacccaggcacaatcaaggcaccttcgttacctagatcacttatatgtacttncaaggtgtatttgctacctacatcacatgcacttnctttgctaaatntacatacatgcatactcaaagcattntggctaccaaaaattgcatacgtgcacattctggtatttctaatacctatacatatacaaactntgtgatgaatcttggctacctacacaat

SEQ ID NO: 301922 - DNA, 483 bp, Glycine max
  unsure (1)..(483): unsure at all n locations
cgctntatgtgatgaacattggttaatggttatgcatgaagagtttattcaatttaagagagatgatgtatgggatttagctcctaaaccaacctctcacaagtcaatcggaaccaaatgggtgtttcgaaacaaacttgatgaatctgacatcacagtaaagaataaagcaagattggttgcaaaaggatacaaccaagaagaaggaatcggctatgatgaaacctatgctctagctgcaatgttagaagctataagattactactttcatttgcttggattatgaatctcagaactttttagatggatgtaaaaaatgtcttccttcatagatgcattgaagagaagtgtatgtagatcaaccacttggatttgtgcatatgacacatctaccatgtctacaaacagacaaaggctcttattgtttgaagcagcaccaaggccatgtataatagattgccaattgttaattagataatctn

SEQ ID NO: 301923 - DNA, 282 bp, Glycine max
  unsure (1)..(282): unsure at all n locations
agcttgattcgtgttttgttttatctntagtancactttggttattagtcgattcattcaaggaaacgtccaaagaanaacgtccgattgattntttttattattttattcaaacatattttgattattttattattattttgcctttttggatttaaccgaggttacagcgtgaacgatcggttagattntgctttaatagtgattaaacgacgttgcaacacaaatgatcggntganattcattntatcatttattaggtgagaaacaacttaaataaac

SEQ ID NO: 301924 - DNA, 506 bp, Glycine max
  unsure (1)..(506): unsure at all n locations
nnnnaaggggacgggaagggatcccgacgncngacncatagacacncagccggatggtgtcgcagcctttatggtcttggcggaagtgtgggttgaaatcacatttccattcagaataggccccacacttgccacgttgtggttcaagttattgatattaaatccggctattacttcctcttgggaagaacgtggattcattgcctgggagtgggcccttcaatgcttcaccagaaattgaaattcgcaatgggtggacttttagtgatagtgtcnggtgaagaggacatgttaatgagctgcccttcttcgcccatacgtagaagcggcggagaatcattggaacggctttcaatccttgaagtgtgactgccctctgtggaccaaatcgtcctacttctcttcaaagcgccatatggtgggcgtgtatgctaagaacgattgagcccgatgggttngcangactgcctcggatgcgactggtcatatcaagaatcatcaatttg

SEQ ID NO: 301925 - DNA, 280 bp, Glycine max
  unsure (1)..(280): unsure at all n locations
agcttgacagacctgcatttttacaccgaccgagttaccactcttgacactagatgacacttgtccatgcttgggggctcgaccgactcgtcccccttctatttgtcatgctacatgacactacgagacacacatcaaccctccatgtcagccttgatgcaagagcatgaacgcctagcccatagcagcccgactccccaactaacaagttatctctaacctcttattatntgaacataatggcatccctttatctctttatgggtattcaattgtctat

SEQ ID NO: 301926 - DNA, 545 bp, Glycine max
  unsure (1)..(545): unsure at all n locations
nnnnnngcggggnccggggnnnaaattccccnanngatnnatngannannaacnncnacnggagggagagagggatagagagagtgagagtggcattgaaattgaatgataatacggagagaaagtggacgtttgaagtgtgtctcacaagtttctcattcatcagagttgtgacaagtgttacacatgtctctatttatagcctaagtcacttacctaaatgggaatttcattttcatttcatgtgaatctaaaggaatattncatgaatatgccaaaggcatcttagcatattccctgtaaatgccacaagcatggaatgtgtgactctagcacatgcgaagcttccttgagatgcaacgaaggtagcttccttangaagcaaggaagaaagcttccttgagaagctagggggggggggtggaggncnnnaactccncggaatacggnattgtagtatcgtctctcagcctggnggcctaaatatgtgtgaatacttttactccaatcctcctgttggagaatctctcaaataatgtagtccg

SEQ ID NO: 301927 - DNA, 484 bp, Glycine max
  unsure (1)..(484): unsure at all n locations
ggcagatatgctgcatgaactganancacaacngaanaaggannngngaagagangganaggataggttctcattaacccccacaggaagagggagggaatacgaaccaaccacaccccccaaacaaaccgaacccaaaggggcgccgaacaacctgagaccccccacagagcagaaacaccgcgaccggcggcccaagggaaccaccacaagaaaaggaccccgccatccatgcaccccacggccggacccgcgacgtgaacaaccaaaagaagcctactgacacatcgcggagaaagaaggacgcaccacaccgaaggaggccaaaaagccccccaaatgaggccgggagagaaaagagagccaccaccacgggcgagagcgcttagaaacacccaacgccgctacaacaacccgcagagcctacggctaccaccacacccggctaggggcaaggaagacgacccccatataagacacacgg

SEQ ID NO: 301928 - DNA, 440 bp, Glycine max
  unsure (1)..(440): unsure at all n locations
agcttagtanatctaatctctatcacgtctggcttaagacgttaaagaagcgctactagaaggcaacctanaattggctacgaagaagctctctgcgaagcagtccaggaaaggcaccattgaagagggttctagtgtggccccacaagctgacacaggttttgacaaccaccgactccagagcgtggaacattagtagcatttcgaggccactgagggatggtcattcctcaggcagagacaaaggcagctaagggatgatgaatttccagatttccttggaggaggcggaaccatacaatcgaaatcaccaaacttgtgatttatccttcattactgctttcaattattctattattttggtatttcctttgtgatataacattatctgcttccaattgttatgcccattgtgattaaactgaacatgcagttatctg

SEQ ID NO: 301929 - DNA, 503 bp, Glycine max
  unsure (1)..(503): unsure at all n locations
nnnccggagcagcctancgacagcgcacccttanattctaagcctncactgatgtgcagggcggagccccttcggcttgctgtttcattttacggctttggcctttgttcttccttgcgagatacatttctctatgtacacttgccgtaggctataaccctacccaaactttccggcggtttcttctgtgcctaccangcttggtcttgtactgtggtcttgccaaaaccaatctatggttggaaccgtacccaacattaacccggccaccatcattgtcgtatcaaacaagaaagcttgccagagaggaatctacgaaagcatgcttactaccttaacgattgganatcatttccatgacttctcgcggcttcacatatggcgagagaaggggaactacangacgtcttctactgatactatacaaatgtcctcactataaactcactttggtggatgtaatggaacactcactgatgatcatggccccaaataacaatgag

SEQ ID NO: 301930 - DNA, 285 bp, Glycine max
cattggttactgtggttcgttggcaaatgatggttgtgatggtggttggtgtgattgttaacggcggaagtaaggtactacaacttcgatctagtttttttccgtataaaacttacaaattaataatccgtatattatataaaacttatggattatcaatccgtcaattatatataacctacggattatcaatctgtaaaaagacaatccatatgaattatgcgaattttcagtaatccgtatagtccatacggattctcaatccgtataaaccagtgctaaatg

SEQ ID NO: 301931 - DNA, 527 bp, Glycine max
  unsure (1)..(527): unsure at all n locations
gagtnnncancaggggnggnancctcnggctagcatgatccccctgnanatcaaannnnnnacnnnncccnnanncnnanagagagaacccacacttcacttgtttcctttcacaacgcacagaggggtgcgagtcgaattaaacatgaatgcatgaccatcgatagttgtgacagtattgacaccacatataacattcatctaagacataggggtgaatcacatctcatattcattaagagataatactgcttatcttggcttgcccaaacatcttggaatacaaacgtgttaactggaactacttatgtgggacatcgactctatcatatggagaaaatattctgttatcccattaactctctcaagagccgaggataccgctggcctgtctttggatagattctaacatcgaagactggactccatgctagtgaagctatccatgatccctagatactgtacggcaagaggtgtagagatatacgatgctatgggtgccaaccatctaatctgcctggcttccg

SEQ ID NO: 301932 - DNA, 207 bp, Glycine max
gattaaagatcaatatgcaactgatgaattagtagagtgacctctaatattacttaagcatccttgcattaattgctgcaaacccgcacttactgcctgcaccttgatagaatatgaagagataggactttcaaaatgtactaatagagattgtaattgaacacaacaatttctatgtataagatgtgtgatacttagatgtgtatt

SEQ ID NO: 301933 - DNA, 354 bp, Glycine max
  unsure (1)..(354): unsure at all n locations
agcttgagagggtgttgggtgatggaaccctaaccctagtggaattgggatcgagttgaggaggaagaggagagaganattgaagccgaaagaaagagaaggatgcgtcgtttgtatgtgtggtaccaacgaactccttttactgagaattgaggcaacatcggaaatgaagagaagagaaagaggtagagagagggaagagaaagactcanagaagaggcaaagagagggaagacaaagaggcagagaagagcagagagagggaagaagcatgaccagtgcgctgcccgatgcgagaaagagaaaatcacaataacaagaaaaagcctattaacaactgtaatgagagagaaa

SEQ ID NO: 301934 - DNA, 184 bp, Glycine max
ttggaaaccatacaggatgcgatgcataacatacaataacgagcggtcgcatcttaggctgattgcgaccggcctatatacagcagcctttgtcacgctacctactcgaggactgccacatcgctgaccaatggaggctaaccatactttgaatcttatatatccaatatcctcgaagaaatcg

SEQ ID NO: 301935 - DNA, 376 bp, Glycine max
  unsure (1)..(376): unsure at all n locations
ttcttcactagtaatcgattacacatttatattntgaagggtcatgactnttcaacttgaatatcaagaatctcgttgctggtaatcgattacaaacatccggtaatcaattacaagtntaaaattcaaattcaaaaccctttttaaaagttttttttcaaaattgtatcttggtaatcgattacactgcctggtaatcgattaccagagccttgatctcttggaaacacttgttntgaagcaaaagcttgatcttgaattaatcttgaagcattgcttgtttggtgaagcaaccttgtatttatcttgaagcaatgtttaacctttgaatgttngttgaagaatcttgaaaacaaccttgtttgattattctttg

SEQ ID NO: 301936 - DNA, 326 bp, Glycine max
gagctctagattgaaagaggagaatacttgtttaagagacaaattgacaacgtcagaagacaatgtcaagacattaaaaaatgtcatgcttgcatacatccaaatgaaggaaggatatattccttttgagttaggtgctatgtttggtcataacactagtaatgtaggtgtaagtacttctcttagtcttgtgttacatttgatatattattaacattcgacgtgaaaagattgttatttcataccatgaatgaagtggacataatgtgccaacaccaagaggaggctcatcattagatacgaatctccatgcaacttgacatatg

SEQ ID NO: 301937 - DNA, 499 bp, Glycine max
  unsure (1)..(499): unsure at all n locations
gggcaccggactacgattcatagncnnacgcgacacttagaaactcaacctgatgcatggcgtcagctctataggatgccatataccttactgctatctccctanacagaggcgcggacaatcgattgtctcatcggcaacacccacgagactgacaanacccagccttgccgcaggcttatcaggtgcgtactcatccagctttggactggggcgatatagcgaacaagctcgagcgattgcctgtcctcaagaaaacaggctgaacatcattagggcacgcaccttaacttctgcgacacatgaagctggattgcaaccgtactgattacccgatgtgaatcagttcgatgcgcctgctgggctgccgtagacgtttagagcggcaactcgaaactttgtctacatgaactataacaatgtccttcctataacttaactgttggggaggtcactgaccactacaacgttggcactggggacccacaatgatgtaacn

SEQ ID NO: 301938 - DNA, 275 bp, Glycine max
  unsure (1)..(275): unsure at all n locations
agctttaacctcattgtctctcacagacnctagagaagggagcgggtgcattccttgtgtccggactctcaaccacttatgatagccgccgatgatcccattactgcttccgactagctctctgacctttcttaacgccgcataccatgccttgcgaactccttggagtaccctagcattgtggtcactgaaacctcgtgcgatgaaaggcgtgatgcttacgtctgatggtgctcctctcatgggacattcttcgcatgaagatagaatcctga

SEQ ID NO: 301939 - DNA, 516 bp, Glycine max
  unsure (1)..(516): unsure at all n locations
gnnccgctgataggaaaagctgnangtacnnntagnannatctgacacactatacaccactcaaccgncgtgatgaagagtagagggactcatgtagtttngataatgattcacangacgacgaacagcccaaagagtgatttcaagattgactcaacccctccaagatcaagtttaatttcaagtttcttgaaacagagatcacgaagattccagattctagagacagttgacttcaagattcaagagaagatgaattccagttcaggagaagaaatcccaagactttcccagggacgtttggaaagattttcaaaaacaaccttgccttgtcttgtttccaaagaagtttcttacattttttaactacagaagtttactctctctatccatacccccggcaagttggtttctagcgttcaccggattgcaccatccatcgattccaaatgggtacctttacagggttgggatccgtccccgtgtttaacttgatttcaaacattgggagtgcct

SEQ ID NO: 301940 - DNA, 306 bp, Glycine max
  unsure (1)..(306): unsure at all n locations
agcttgtaatgttacacagtcctacaaaactccgaatgatcgttggtcttcatattgtnttggtaacgcaaaccgccctctactacttcaactactgtttgaggccacttgtcccataattttaaaacaatatatatatttgggttgaatggttcatgctataatagctttcagaaattcaccccccctcttaagttattgaggccacttgtccaacaattttaaacatatatatatatatatatttgggttgaatggtcatgctatcatagctctcaaatattcttgaaaataatataattggat

SEQ ID NO: 301941 - DNA, 395 bp, Glycine max
  unsure (1)..(395): unsure at all n locations
ggggggccgggggcctgnngnttcctgtnncaaaacttccaatagcttgtgggccatctgcaagcatattgttggttttnaccacggacgtacttaagcaaatggatacactctccataatgaacatcatgatattacagcagctatcgctatttcttacaacgtatctgcccagaatttataaccgaaaatgccccaataaataaagcactcggacacaatattaccgactacatgtgtttgtacttcataacacttcctggctaattaatactcatctaaacgtttgggacataatgcctccccattgtttatatcttcatccccctgtgagatctgaattaccaaacggctattagcttttagaatcgtctagcgatgattaaaaattcttc

SEQ ID NO: 301942 - DNA, 514 bp, Glycine max
  unsure (1)..(514): unsure at all n locations
cccacgttttggcgtcncgancggactgannacacanaccncaacattgncaggagctccagcttgaccgcgcggtatcatttggcgttagtccaggnacgccgggcgtcatttaaggacggacacacgaatcgaaagaccnnaagaatcccgcctgtccnacttcacaacagcgtaagtattttgcgcccataccgcggattgagtatggcaccccacaatcgaacaaggtaaccacaaattattcgcacacacctggaccccggcaacacgcggctcatcattcatcaatctcagcccccactggcgtatccaccacaagcctgaaacaaagttgatcgcaatccctccggcatgggactaacgacgaaagcgaccntcctcccacgcgttttccggctacacagacctcaggcactgttcctcttgcacgctgctcggcctccccgagacgccagagcacaaagctcctcccgacacccggaggacccaacggaaaacatgagcgccgacg

SEQ ID NO: 301943 - DNA, 408 bp, Glycine max
  unsure (1)..(408): unsure at all n locations
agcttgtattttagtcctcgatcggncatctttcctggccgacgccgactgtcatttttttcgatcaatatcggtgaataatatttttttgccgaggtgggctaatgttttcctggccgaatgaatgggaacatgccaatttcggccgaaacgaaacatcggttgagctcgcacgaaaaaacctatccgacctacattgtaagttttttatgcaacgccgaaacaagaaaacttcccctgccgtaggaaaaaacattatgggcagcgagcgttattttaaaataaaaaattgcgcaatgtcggctgaaaaatatcagtcggggccatttcacgaccgatgtcggttattgtgttttctattcaatccctgaatgaaatatgcatgatgtcgatcccgaaatgtntgat

SEQ ID NO: 301944 - DNA, 364 bp, Glycine max
  unsure (1)..(364): unsure at all n locations
gagttagttatgaatattangactttacactngatgttggtgacactccttctttctacacatgtatgcctttcatgtaagcagaaaataangtgtaatgctcatgatgaaggcttatgggagaacattcctatctgattggcatttacataagtaatgcttatgttatggtatagttaacatcattntgttgcatatttacactctatattaacttaatttgtatagatgcaattgccactaatgtgtttattattntatttgtataggaacatggctacaccaccaagctaccttcctcctaatcnccagcttctatagagtctacctctaggaggactaaacaatgtacacggctcataag

SEQ ID NO: 301945 - DNA, 502 bp, Glycine max
  unsure (1)..(502): unsure at all n locations
aggagggaaacagtggctctgaatgctctgcctaaaaacctngaaannacacagnaccaggagangccggaccagncgacccgacgcacgcgaacccacggtttagttgccaatgcctaccagccaacacaggggcggagcccgaggcacgcaaaataagaccacaccagacttcntgagaagaaccatccgcaagacaaacgagagacacaaccgtgccaaaaatcccacaggagccacagagtagaccgcacacaaccgcaaagggctgcaccagaacccctcagaaaaaaagcaaaacccgggataacgcccacccgcatattcaggagcaagcccctgcggaggagtagaacaaaccaaagaagcacctccacccacacacgccaagagcacagcaagccagggaaaaccgacaggcccgacacaaggaccacaaagagaagagccatcagattaacggagaaagggacgcaccacgcgacggcaggggaagaccccg

SEQ ID NO: 301946 - DNA, 281 bp, Glycine max
gcgaatcctgcgctaaaggcgtgatcacgaccatacttgttaagcccaaaaagtccgcttaatacgaggtcgcctgagcttacttaagcctataagaggagtaggaagcacacgaaaaagacacaccgagactaagagttatctaaagaatacatactatgtctgagcatcccaaataagaaaaatctttattctatggcaatcattcccgtcatctcactttattcatctaattccttaatctattcacatgaccttttaaagtatgaagcatgaccatg

SEQ ID NO: 301947 - DNA, 407 bp, Glycine max
  unsure (1)..(407): unsure at all n locations
agtacagtaccattcanatataaaagtggtcncattctatcatatngcaatnaccaagctgtctggctttgacgaggaattaaaaaggaaaaattcttttaattttagccttgttaaaaaaataaaaaataaaaacactgtacttttatcctctaccacatagaagccactatgatacttaacgagctctatctagcattttggactcgcttaattaaatgagtaattgaaggactactctaactattttttttttttaccagcgtctataaacattagttaagaaattaaaatatatatatatatttattataaaaattatatgagagggtcaaaaaagtatgaagaatatatttatactatctataaaatatattgttttaatttttaactatgtcttagacatc

SEQ ID NO: 301948 - DNA, 442 bp, Glycine max
  unsure (1)..(442): unsure at all n locations
acgtaaatcgtatactagcactancanctgnanaacnacaaacngtgatgctgtaagcgacctgcatgcatgcagccaatgtgtcttaagctattggcgaggacaggggcgcgatctggtgacttttacttccgtactgccttcggatcgaacgtcgaatgctgcatggtcgttaaaccctgtccgtgggaaaggttcaaagttgaacctaggagctcttaactagtatgacacacctacttagacgacagcagggataacttacccaggttacttttgcattttggaggaaaagtagatgccatacctcaggacntgcgactatgctatttctgacagcatgtacagaacaacactgtacctaatcgagatatcacgttacttaggagctcgcatccccgcttcaattggacgcggctcacgactaggctgtacaccatcc

SEQ ID NO: 301949 - DNA, 468 bp, Glycine max
  unsure (1)..(468): unsure at all n locations
cggacgtnnaacgacgatgactgangncannnannngaccgggagcgaacgaggaccgaccggacgaagcactttcatttctcaaccgcaaacagaaagggcggggcgcagaacaccaaacagaccccccagaggcaacgaaagggggaggaaccaacggcggacggggacacgccaaancacagaagcgacaagacagaggagaaacggcaccgagagaaaacaacaagccgagcagcaaccacacaaaataacacccccacgcagcgaagaagcgcgctagcccgacgagagaccaaaaaagccagccgacggcgcacgtgtaaaacaagacaacgagcaacaacgacaacacatgctcagcaggaacggaagcaaagaagaacacgagaaaaggaccccgcgcctaagaataaccaaaacaacacgacggcccggccaggcgacaggcgcaaggaaaccgcggcn

SEQ ID NO: 301950 - DNA, 451 bp, Glycine max
  unsure (1)..(451): unsure at all n locations
agcgacgacgtnttanagcatgcttgaaactggaaaanccgccanaccggggtcccaagagctaacagccgccgccacttttttcttcgttctggacaaacaggggggggggatgtcggaaatccatatatctctagtcatctcctcatcatagacggtgatccatcctcacacaagctctattgatgaaccaccatcatgagactcgatctctagaaataccctaacggaaacgtctcgctctacacttgaagacccacaccgctgatttctcacgcattaaggtacaaactgccctagcatgtcatatgcttgacattcgttagactactttctcactatgttagttactcgtaacacctgtgctactaaactattggcgggatggcaaagtaaacggactgggcatcaatgaacactctacggaacagttacttaccataaccctcac

SEQ ID NO: 301951 - DNA, 447 bp, Glycine max
  unsure (1)..(447): unsure at all n locations
caccttatctgggggagcctaattctaaatgtngtatttgtgctcggggntatcattcgctgaggggtgattatatttatatatttatccctatacattntaaaattntcattnttatttttatttttttatttctcaatttataagtntaagatgacatttggtattttattaattntacttataatgtactaatgttgatacgactgtagagatattaccaatccttatttatttaacttctccatgaagattgtaattatcaatccttattactttaaatgcctatcagtccattttcctttntgcaaatttgaattttcgccattggctaaaaactgtactagaatatgaatgaatgtgaattgataatgggtgctagaaaacattgtagtgcagacagtagatgtggcttggtagctaaaagattggactatatgtatatat

SEQ ID NO: 301952 - DNA, 446 bp, Glycine max
  unsure (1)..(446): unsure at all n locations
agcntttcntttagnatanacttccttggagaagctaagagctngaggctacaccacacgcccttattaatggactacagcttaccttcctctggagatagcttcctttggagaaatttccgttgagaaagcnnttccttgagaagaattcctagagaagctatgagcttatctacacacacctctctaatagctaagctcacctccttgagaagagaagctagagcctagctacacacccctcataatagctaagctcaccctatgacaaaatanatgagaatacaaaagaagtccctactacaaagacaactcaaaatgccctgaaatacaaggctaaaacagaatggccaaatacaaggcccaaaagaaagaaaaacctattcaaatatttacaaagaagagtggatccaaccttggcccatgggctcagaaatctaccttgg

SEQ ID NO: 301953 - DNA, 318 bp, Glycine max
  unsure (1)..(318): unsure at all n locations
ctatcatgagtaaagatcgnttacccactcattaatacaactagcttattgctagcaaaatcgagtcatattcatagtcctgatgctttcaatgttaatttccttattgtggtaatgcttcttctgatgatgagatggcttttgatctgaggatgaatcttctccaccccaaaaaggatcctgcagtgcaagattgagcanagttgtaccaaaaaagtcatccgtgtccatattttaacaaaggagtacaccttttccaatggaaacgaccttctaaggagactgcattccctactagcaatgtgttgaatgatattt

SEQ ID NO: 301954 - DNA, 402 bp, Glycine max
  unsure (1)..(402): unsure at all n locations
aggatgggttgttgtatgctganactggaaaaccanacnnccgtgtccanagagcgaccgagcagcaacttctataattctacaaacaacgggaggggtggaaagaaaatacacctattcccataatctagcagctcgcagcaactgaagccttgccacatataggatgcgaatcttcgagaatcctcacacaagttgcctaaaataaaggttacactgacccaacacttataactccaatggccaggaatagacgcctactattgaaagcatagactagaagtaacacaatctccaagctcacactggagaatatgcatatgaactagctcatctaaaagactaaaccacttgaatatccataacaaaaaagacccacctgatcttatcctaatgaaagcn

SEQ ID NO: 301955 - DNA, 405 bp, Glycine max
agcttctgatggtgccctattgtgtgctgtttttttttttagacaaattcccttagcaatcccccaaattaaggacttatcataacttgaaacccttatgctttcttagaaccctaaaacaaggtcaaggatatcaaaattaagctcaggggtttattcaaacaaatcattattacttttggctcaacaggggtgcaagggataaattcatcacaggttagctttttggctgagtggctaaaataaaaagaaacatggccttgatcatatccaccttatgtaaataatctaacagtctaagaatgatgcaaaattaataatttaaaaacagacgttctctcataattaatgtcacacagctcaccgggacaagataaagttatcggcttaccgaaccatgatctc

SEQ ID NO: 301956 - DNA, 356 bp, Glycine max
atgagttctggttgcaaccttgtctttccatttttttatgtgtgcatatcttttcattctcgtctccctttgccaaaaagaattcgacaaggactaaccacctgaattctttttgtgtctctcttctcccttttctaaaagaacaaaggactaatcgcctgaattcttttgtgtctcccttctcccttttcaaagaattcaaaaagacacagtctgagaattcttttgattcttccctttcccttaaacaaaagatttcaaaggactaaccgcctgagatatcttttgtttccccttcataaagattcaatagactaacccgctgagaactttgtcttaacacattggagggtaca

SEQ ID NO: 301957 - DNA, 382 bp, Glycine max
ggtttgcattcttggttttacaatctatatgcgtcggcttaagaggaatattagatttatgttatcttttgtttatccaatagtacttgcttatagtattaaaactttcttatacctttttttttttctgtaaacttatatatatatatatatatatatatatatatatatatatatcaaagtctattgagtgtgtgggacactctacaattattctcaactacatataacatgatcattttatgttcattgaaaattgcgtcttaacttgattttcatgattgatgttaattatcacttaatatcttgtatagtataaaaaatatctacttaaataaattggcatgaccgttatgatcctttaaggaaaaaaaattgaccg

SEQ ID NO: 301958 - DNA, 403 bp, Glycine max
  unsure (1)..(403): unsure at all n locations
gggaggnntttgtgcctcntagcactcgaaaaccngaccgggatcttacagggacctcagatgcaaccggctgctatctctttgtggacacaagagcgtagccggagtgaaccaaccgtgttgtaaaaggacttgcatatcttcttactttttgccagtaggccgatctgttgcattccttcgtgaagacacatatcaattttctttattagaacacattatcctatcccactaacccaaataccaaaacggaggcatgtaaccctacatctattaaaaaaacgcagaggtgcctcatgggacatcttactaccctggaggactactagccgcaaaccttcaccagccatatcttaaaggtacccgtttatgaacttcagactgatcagcaagacatatcgaa

SEQ ID NO: 301959 - DNA, 425 bp, Glycine max
  unsure (1)..(425): unsure at all n locations
agcttgtatctcttgtgcaatntcttagtcacttaaaaagttatgactttagaaataatcttcagaaacaagtcacttgaagaattgtgacttttggaaatgtatttttcgaaatcagtcactggtaatcgattaccattgaggtgtaattgattacacatcaacatatgtgactcttcattttgaattctgaaaatcttaaagttttaaaacactagtaatcgattacagctttgtaaatcagtttgaaaaacaatgcaagctactagtaatcgattactaccttctggtaatcgattaccagagagtaaaactctttggtaaaagattntgtgaaaacttcatgtgcaactcaatgttttgaanaactttntagtacttatcttgatngagtcttctcttgattcttgaatcttgatcttgat

SEQ ID NO: 301960 - DNA, 326 bp, Glycine max
atcgaaataataaacctctcactcgcttactatggattattgctactaataataatcgccatctgtcaccatgaaatattatcttaatgtgatttgctccatctgacttcatgccacatgtttatgcaagactctatttcgatgttgataatttataatatactaaaagaaccaaagtcgagcatcttaacttatatgaatcatgacaatatgttattcaataatgcaattaatgaaatactacatgtgtgactatcattaaggaatattctcttattgataatatcactatgaagatggcatcatgttatacataacatcaatta

SEQ ID NO: 301961 - DNA, 413 bp, Glycine max
  unsure (1)..(413): unsure at all n locations
agcttagctctagatgtgatggaccttntcaggttntggagaggatcaataacaatgcctataggttggacctcccagaagagtatggagtcagcaccacttttaacatttctgatttaactccttttgcaggtggagctgatattgaggaggaggaactaacagatttgaggtcaaatcctcttcaaggggaaggggatgatgcaatcctccctatgaagggaccaatcactagaaccatgagcaagaggctccaagaagattgggctagagctgctgaagaaagccttatggttctcatgaaccttatggtagatttctgagcccatgggccaaagttgggtccaattatctttgtacatattagactaggatgtcattatatttggtccttgtatatanggctccatatt

SEQ ID NO: 301962 - DNA, 278 bp, Glycine max
tctcattcgtgaaagttacaacaagtgttacacatgcttatatttatagactaggtagctgccttgagaagctctcttgaaagaacttccttgagaagcttctttgagaaaacttccttgagaagctagagcttatctacacacacctatctaaaaactaagctcacctgctggagaagctttcttgagaagctagagcttatctacacacaccgctctaataactaagctcacctacttgagaagagaagctagagcttaactagacacccttataa

SEQ ID NO: 301963 - DNA, 419 bp, Glycine max
  unsure (1)..(419): unsure at all n locations
agctngngttatgttgcgcgtactgatgggtacaatgaggtgtgtgctggggtttgacccacgcgggtgttgaagagacggcatgggcatctccttccttcctttntgcccgtgttgccccgattcttttggcattcgcgnttgtggaggacacgtaatcaaactttcctcttttcaatccaacctcgattctttccccggcaaacaccagatccgcaaagctggatggcatgtaacccactagcttctcatagtagaacactggcagagtgtctaccatcatggtgatcatctctctctcaaccatgggaggagctacttgtgccgccaaatccctccatcgctgcgcatattctntaaaagtttcaccctctttcttgaacatattctgcagttgagtacggtcaggagccatatca

SEQ ID NO: 301964 - DNA, 352 bp, Glycine max
  unsure (1)..(352): unsure at all n locations
cttctttatccccatatcaattatgcagcttgtagttaacatgaatggccctcccaatattataggaatgtcattatcttcacagacatccattaccacaaagtctatcgaaaagataaaatgtttactctgaccaacacatctttaattactctgtatggtctggtaatggagcaatcaacaagtngtaaagtcatcctagtgggcatgatctccaactctcccaaccttctgcacatggagagtggcattaagttaatattggctccttggacagagtggcatttgctgtaaagctttccaagggcatggttatttccagtttcctgaaatatctaanaatcttgcaaat

SEQ ID NO: 301965 - DNA, 403 bp, Glycine max
agcttggtgtatattatctatatgctccagctagacggggagtgttgaatatcttttggggcttctaaattagatgtgtatgcatcattactaaatatttttttcttgttttagaaggcaacacacatagactagactacgctgtcacatagactatgctaggctgtcttttccccctttctctctcttatgctgtgtactctataaattgtaagctgaaacatgaatatcaagagtcatgtgagtgaaatttccttacacttaaactcaagtgtgaatttgtgatgccttgcttctgtggatcggcgcctgagtttctgtatgatggtgtttcttttaatcccctttgcctatatcctgctattgtgtgtccatgaagacagctgcctttgcactacctact

SEQ ID NO: 301966 - DNA, 315 bp, Glycine max
ccgtgatgttctcgtaagagcgaacagtgaaatacaggatgaatccttgcctcctcgggtagtttgagtttgtatgagacttggcccacacgttcgattatctgaaacggcccaaagtatcttttggttagttttgggtgtattgaaccaactacggtgcgttgccggaagggacgaagcttaacgtagacccactggcctatgctgaaggtgacgtcacggcgcttggtatccgcgaatttcttcatggtgtcttgtgccttttgaaaacgatgttgtaacttccggtggatctcttgacgcgagtgtagcatg

SEQ ID NO: 301967 - DNA, 414 bp, Glycine max
  unsure (1)..(414): unsure at all n locations
agctnccattgttcaattntgttcgtctcgatatattatgcgcctgaatcgcacatccgagttaaaagttatgaccttttgaatatctcgagagcttccattgttcaatttcgagcgtctcaatatattatgcgcctgaatctgacctccgtgtggaaagttatgaccatttgaatttctcgacagcttccattgttcaatttcgagcgtctcgatatattatgcgcctgaatcggacctccgagtgaaaagttatgaccatttgaatttctcgagagcttccgttgttcaatttcgagggtctcgatatattatgtgcctgaatcggacatccgagtgaaaagttatgaccattttaattgctcaagagcttccattgatcaattttgtacgtctcgatatattatgcgcctg

SEQ ID NO: 301968 - DNA, 375 bp, Glycine max
  unsure (1)..(375): unsure at all n locations
cagcagaatttagtaatgacccactaacctagaattattatattctattgccattaacctanggaattaaaaaaaaaaaaacttaatggctgagtgtaactgaaatcgtggcaaccaaaagtcacccccaacaaccaacaagtcagccaccatttggtctcccaaaaggctgatgcctaagttgccaattgggcccttattacaacttgaactaaacctaactaaagcccttttaattgattaacccaaaacatatttttggtcaaccaactttacaaggattgggacattatttagacaaactaaacactctaacaattgagacaaagtggtgtcatttaatcctccttcatatgggccatgatacaactcaca

SEQ ID NO: 301969 - DNA, 380 bp, Glycine max
  unsure (1)..(380): unsure at all n locations
agctttnatttcgtccttcaagatcatgcctttgacccatgatgattcctttcacctctttggagcttgagctcactattgctgccctataaagcccctcaaaactttgctttggtcgtgttcttcctttcgggccttcttggtttctcgttccaaggcttcagcggtggccatattgacgtcccttagttcatcatactcttttcagactttgatggctatggacttgaacttctcttcgactacccaggctctttcaagctttgcctttagggttgtacctcatcactttcttccgaagctttaacctcgtcatctctcatagtctntagatgtgggagccaatccaatccttgtgtccggtctcttagccgcttatg

SEQ ID NO: 301970 - DNA, 375 bp, Glycine max
tcacatgtggtactatgtggtggtcgggcgatggtgcacaacaagttgtccacatccacaaagcgcgcataaacccaccatcccctgttgcccacctccaactgagctcacgtactcccacgtagcccatatccttttttctctcaacaccgggtccccatcaatcctcccaagctttcccaacatcaaagcaaaacaacattcaaacagcacaagctatcacagccaagcaaaacagagcataggcagaatactctgccaaaacaccaaccaaatcacagcttttctcacttaaagaccccagtaacaattccttcgatccaattcggtaaccgttggatcgactcaaaattttactggaagtctataatacat

SEQ ID NO: 301971 - DNA, 125 bp, Glycine max
ggggtttctctacgcgcagtggctttttacgggggcgcaggcagaagctcagtagcagggcatgacggggggaggcgccacgggctaagcagtgcggcgcagcggggaggtggaagccgtgaaag

SEQ ID NO: 301972 - DNA, 416 bp, Glycine max
agcttttatgattaaactaagttaactaacctacggttaaaaaaaaataaaaacaacgttaaaggaagcttacttggattgctgaaattggatgcaaagaaagaagcaaggagaacaagcaaagagtgagagcacattgcagagaagaagcaccaacgaaatgccaaaaatgtagtttaaaagcacaaatgaaaatgtaactgccaaaggcagctatgccttattgtttgaggtttcgaatgccttgcttagcgcatcaactcgctaagcgagcatacataacgtttaagattccaaacacacgcacttagcatgcaaactcgcttagcccaatgaaaaaattcaaattttccagagaagactttgggcttatcgtgaagagtcgtcgctagcgaataatcatgctccttaaatgt

SEQ ID NO: 301973 - DNA, 117 bp, Glycine max
tcactgagctcacgtctccgcgtacccatatctcgttctctcacaccggtcccatcaatctcccagcttcccacattcaagtatcgacatcaacaacacaactatacagccaaaaac

SEQ ID NO: 301974 - DNA, 51 bp, Glycine max
  unsure (1)..(51): unsure at all n locations
accttgtcgccttgcgtataatatttgcccatggttgaaacggtggcgaan

SEQ ID NO: 301975 - DNA, 413 bp, Glycine max
  unsure (1)..(413): unsure at all n locations
agctttatttnttatcgggtgttctccctttattttggtttctaagttttcacactacaaaaagtttaaattgttttgtgctgctggagcttctacaccttgcattgcattttcggtttatatctgtatcattggttaatttttaaaaattattcttttccagcccaaaagcttaaacctgtcttttgtgtttttaaaaaatctaacatttcgattttgaaaaccaaatctgtgatttttatgtctgctccctccccagtggatttctatattgtgttcttggtggaggaacgcactaaagctgcggtttttatttcaaaactctatgagtacacgttccttttgttggtgacttctcacaaacatctctaatgattaaagatctttacatgcatatatgtatagttataaat

SEQ ID NO: 301976 - DNA, 374 bp, Glycine max
  unsure (1)..(374): unsure at all n locations
ctagaganagctacatgaagctgcctcggtaaaaactgttgttcttccttcgttaatcgttggatcttctcgaaatttggtctacaactttacaagacacttttccatgatctgaccgttgagatctttgagaagatgtctggagtgtgctcgaagcttccgttcccgagagcatttcttatttaagcacttcagcctttgctttcgtgtagcataggaaaaacgtcatttcttcttctttctttcttccaaagccatttctaaagttccaagcactttctccatcacccacagccaccattagccactacaaaccatcattgttctccattgaaaccccacaccgagaggaacccttcaaccgaagcggagtc

SEQ ID NO: 301977 - DNA, 363 bp, Glycine max
  unsure (1)..(363): unsure at all n locations
tatcttgattgtgtgtaacccaccatttttatagtaaaacactggtaatgtgtctactattattgttagcatttttttctccgtcattgaggtgccacttgagctaccaggtctctccacctttgggcgtattctttgaaagatccgtgcccctttttgcacatgttctatagttgcatcctatccataaccatatcaaaattgtactgatactgcctaacgaaggcaaccattatgtccttccaagaatggactcgggaaggttccaagttagcgtactaggtaacagctacccgtgcccctttttgcacatgttctgtagttgcatcctatccaaaaccatatcanaattgtactgatact

SEQ ID NO: 301978 - DNA, 324 bp, Glycine max
cgccagtagaactggcagcatccatggccattactgattcttcttacaatttgtttaaaaacaaaccttgtttggtaaatagtttttaaatgaagccccctacagtaaatttgcctatcttgcctatcttaagacatccttttcaactctacaggtaatctgtcacacatggtttatatttatttctcgagaattattcaatctgcagccaacccaattcaagaactaagcaccatgacaaatttgcttaaaatgtagtattatatttgcttttaattagatctgcttaaaacggcaatagttctaagattattaaaaaatatc

SEQ ID NO: 301979 - DNA, 512 bp, Glycine max
  unsure (1)..(512): unsure at all n locations
aaccaacgcnacactgatgaccagtanngacntnntagnannaacanggnnaangngagctnggatccacgggatccgctagagtggacctgcatgcttgcttgtctcgntgtattcaaagcacagacccaagaggtgtggtgctgtaacgacaatgtggccatagaaaaacaataacatcataaacgacgatgtacttgggacaatcaatgcggaccaatagtgctgacccatgcttgactctttaacaaaatggtaacgtgataaatatcttacagtatagatgttacgtaaagaattgcatcgagcatgaatacccaaactgaagaggatataagtgattgctaaactcatagcctggaacgcgaaattctcttgttaaagaagacgcgattcttattgaaagagcgggccgatttattaatctgatcctgttcctaatctatagaccacgactactcaactgaccgcatgaggtaatgcatcgaggaaatgctaagatatggaatacg

SEQ ID NO: 301980 - DNA, 379 bp, Glycine max
  unsure (1)..(379): unsure at all n locations
agcttttgttttctatccatatctggccttgacattaaccagacttaacaccgccgacaatagcgtcaaggaattgttgcaccccggatacaaaggcttctttgagtcaccctgcaatctttcatacacaggggcatgtgcttgctggaaagactcttgtccaaggtcacgaatcatatcctccaagcgatgtcccatttctacatcaaacggtttggattgttgcccactctgcatgtctgtcatttcaccatgccatatccacgtcgtataatttctcttaattccatcacacaacagatgctctcgtatgtcatccagtatttgtcgtcttccattcaaacaattgatgcaaggacaataatattntccatcttca

SEQ ID NO: 301981 - DNA, 281 bp, Glycine max
  unsure (1)..(281): unsure at all n locations
tgangtcacgggtgaagaatgtgaccaataccacttaacgccagccagatgaagaaaaatggcgatggatcacaatgataaacaagccatcgtgggatggagggatggagacacaccaagccgatatttatttctcgagaatatatcaatcaggccaccgatccaaacgtgaacttgcctccattgctaggtgcgccaataatgatgctgggtgcacctaccaacacttatataccgcgagtgaaaatgttaatgggcttatacgctgatgcatctaactt

SEQ ID NO: 301982 - DNA, 270 bp, Glycine max
  unsure (1)..(270): unsure at all n locations
agctcgtattaaatatgtctttaaaacactcncaatgagaaagtgaatctttattcctttattaatatatatgtgaggggtaaagggtgtcacataggcttcttgtgaacgactttcctgatgaatgaatagtgcataaaatcctggtcactatacccgatatgtctgaatctaagatatcagcattggatgattctaaagacctgtcaaccatcaccttgcgagaactcatatatgctctacaagcccaggagcacagaataatgatga

SEQ ID NO: 301983 - DNA, 296 bp, Glycine max
  unsure (1)..(296): unsure at all n locations
acatttggggttgctatggcgctctataagtggattcccattaagttagtatacaagatcatcttgcttgccacaaacttcattntgggcaacaccaatcactatggcatcaagaggcccaagaccggcccaatagagctcaaactcgccacagggaaaaccccacatcctgatgttggtcaagttgcacacataaaatgtggtaacataaaggtatacacaatatggctcacattaagtgactccattgggtccttttttaccgacaaatgttagacgttagaatattagttttt

SEQ ID NO: 301984 - DNA, 389 bp, Glycine max
  unsure (1)..(389): unsure at all n locations
agcttaggttcccattcttgtatctncaatgcaaggaaacatgcatatggctaggaatccaaaatttggttttagaattagaanaacatganaaattaggattttcttgtgagaatttttgctcgaatttgggctgccccatgtttgatactttacatagaggtagcgtggaaaacaccttgcaatagtgtgtatacataggtaaatataaggagcatgaaattcctagcaaagtgtgaatgattatcttcctaaatgaatgcatgatagcacgaaattcccttttgaatgcaaaagtgtgtgcataatgtaaatagcttgccgatatgaataaatgtgaatgaaacaataaaaaanaaatttgtatgatatatatntcaaacatatgt

SEQ ID NO: 301985 - DNA, 421 bp, Glycine max
  unsure (1)..(421): unsure at all n locations
agctntactttatattttagtaatgacccactaacctagaattaaaataacttaatgccattaacctagggaattaaaacaaactaaatgactgagtgtaactgaaattgttggcaaccaaaagtcacccccaacagccaacaagtcagccaccatttggtctcccaaaaggctgatgcctangttgccaattgggcccttattacaacttgaactaaagcccttttagttgattaacccaaaacatatttttggtcagccaactttacaaggattgggccattatttagacaaactaaacactctaaaattgaaataaagtggtgtcatttagtcctccatttgggccatgatacaactcacaaccttggacttttctccttgaaacttgggcttgtattcaaatagtatggacagcact

SEQ ID NO: 301986 - DNA, 493 bp, Glycine max
  unsure (1)..(493): unsure at all n locations
nccccgccgtgcctgaagcatgcagtacggacactttngttaccatgcttccncctcaatttcgagcgtctcgatatattacgagcctctttcttacatccgagtaaaaagntatggtccgttgtattggatcagagcttcaacattcaatttcgagcgtctcgatatgttacaggactcaatcagacatcagagaaaaaagttatcgtcgtttgaattggctcagagattcaacattcaatttcgagcgtctcgatatgttacgggactcaatcagacatccgagaanaaaagtattgtcgtttgaatttgctcaaagcttcacattcaaattcgagcgtctcgatatgttacgggactccatcagacatccgaggtaaaagttattgtcgtttgaattggctcagagcttcaaaattcaaatttcgagcgtctcgatatggtacgggactcaatcagacttccgagtaagaagttattgtcgttgaattgg

SEQ ID NO: 301987 - DNA, 414 bp, Glycine max
  unsure (1)..(414): unsure at all n locations
agctnngattaagtgttgatgtctccaagaacatacttcatattgcatggaaatagtatagccagtcgaagaaaaaaggggttgcacttctaatcttttatgtttaagtgagttgagagagtgagtgacaagtgtggggtggaccaaagatcatggagtgttattgtccacaggattataagattctgcacatctaatgggtattaagggattttatgacaataagctaattaacatatgtaatcatgtaagttacctagatcaacatgtcatttaaattaatcatgcacaatgttaatttacacagcgtgaatttatatcgtcctatctttcatagtgtaaaaaataaattctaatgaaatttatattctactaactttgtcacataacataatatgtatataattgatatcg

SEQ ID NO: 301988 - DNA, 419 bp, Glycine max
  unsure (1)..(419): unsure at all n locations
agcttgnttatgtctctnaagtttgcttctgctcaacaagggagggctttcttcgtttttggcgattcactcgtggacagtggcaacaatgatttcttggctaccactgcacgagcagatgcccctccttatggcattgacttcccaacacacagacccactggacgcttctctaacggccttaacatccccgacataatcagtatgactttgtgacatgttagaaaattagtagaatggattagtgactaaatttagtgacgaaaaattggttattcctcactaactctaaaatcactaaatttagtgacatttttaaatataaaaaaattacatataaatttttcagtcactacatttaatttttatacaagttataagaatgtttgtttggttctagtctcccatttgcatgcatg

SEQ ID NO: 301989 - DNA, 402 bp, Glycine max
  unsure (1)..(402): unsure at all n locations
gagcactcctgtggtttaagacacatatatgttcgtgggcttcaactgggtgagatattactatacaaaatcctatcagtattgtctatgtcaacaaatcaaagccaaattgaatggatgagactaagtagtacgtgcataaagtcctttaaggggttgaggtttgtcagcagaaaataagcacgaaagaatctgggaattgtctcagctgttttgaatgggacagcaacgaggaggaaactaagaattaaatatggtttgaagctccgatcgctctatccattaaaagtggaatgtgcaattagacatatggtctgagtatgtctgggaattgattgagtaattaaagaagatgcatgttaattactatgttgtccattctaanatgaatattaattaata

SEQ ID NO: 301990 - DNA, 118 bp, Glycine max
ctttgggatcattcttacgagatcattaccgtggaactcgtgaaggcaactgggtgggcttatctatccttgtctggagccaatcctacatcactacaaagttctttctgtatccact

SEQ ID NO: 301991 - DNA, 342 bp, Glycine max
atgaagaaagcatgattttcagcaaagcacagatctcaagatcagaattaagatagactcttataaaagtgtttgaaaggcacaaatgcatggccaagagagtttctatcttaacaaaaacttttccaaagcattttactctctggtaatcgattaccagatgttgtaatcgattaccagtggccacaaagctttctggaaatgttttccaagttattttcgaagttttcaaagctcttatccattaccaatgctttaaaacagctaaaaatgattttgtaagtgtcgaatcgattacacatcatatataatcgattaccatagcttttgaacattgcacat

SEQ ID NO: 301992 - DNA, 368 bp, Glycine max
  unsure (1)..(368): unsure at all n locations
agcttctctatatattatgcacatgatggtcataacttgtcacacggatgttcgatattggcgcatcacatatcaagacgctctgaattganaaccggaagctctcacaaaattcaaatggtcataacctgtcacacggaagtctgattcaggcgcagtatatatcgaaacatttgtaattgaaaaaagaacgcactcgagaaattcgaatggtcataactttgtcaacggatgtccgatacacgcgcataatatatcgagacgctggaaattgacatcgtatgctctcaagagattcatatggtcataacttatcacacggtagtccgattctggtgcataacatattgagactcttaaaattgaac

SEQ ID NO: 301993 - DNA, 416 bp, Glycine max
  unsure (1)..(416): unsure at all n locations
agcttgttctttgattgtatcatgcatctcttcatgacatcgtaatggacatatcattcttgcatatatcatttatcatattcatgcattgcatttgcatgattcattgcattatcatacatcttcatttagcatgcctttgttttgccaattgcgtacattttcatcatttgcatgctatgttcactcatgcatgatcctgacacatatttgctcatgccttgcattntctgcaaaaaaaaaaaacagaaaaaacgaaaacaaaaaagaacaaaaagaaagtcacaatgaagcatgaaagtttacaccacattcttagttaaatgtgttgggtaccatgatgatagctataaaccaaccatgttgggattatacactcatttctcttannaaatgattganaatcatgtgaacat

SEQ ID NO: 301994 - DNA, 332 bp, Glycine max
tttgaaaaaatcttcagaaacatgtttcttgaagaattgtgacttttggaaatgtaatttttgaaatcagtcactgggaatcgattaccattaaggtgtaattgattacacatcaacagatgtgacttcattttgaattttgaaaattaaaacgtttaaagactctggtaatcgattacaagtgttgtgtaatcgattacacaagtttaaaatgatttaaaactggttaacacaagttgtaactcttggaatttgaaatcttaacattataaaacactggtaatcgattactaccttctggtaatcgatttcagagagtaaaactctttggt

SEQ ID NO: 301995 - DNA, 343 bp, Glycine max
  unsure (1)..(343): unsure at all n locations
acttgattgttacctcaannccgcagcggaggcggagaggatcccatatctactcgatactcaatgggagcgcataaccctaaccaaggtttatcagcctccatttctacgagaatacgactcgaacgcaacaggtgcttgtcacggtaaagccctggggcattccattgatcattgtacggcgtctgaatcgtaaagtgcaaggtctaattgataccgggcaggcagataatcgaggagaatcgcttgttgaattctaacattcacaagcaacaccttacatggggcaattcttgaactagtgacatgactcatcacgactagcacgtatatgcctaaacca

SEQ ID NO: 301996 - DNA, 399 bp, Glycine max
ttctttgtcttgagtcatcaagtgattataaatatgtgaccatggcatgagtttcaactaacaatcaatcatcaatcatctttgaatcatctatctttcaatctttacaacatcatctctcaacatctttcaatcaatctttcaatatcttttctatagaattttctaattcatttctcttcatctttctaaaagttttttatcaacactttctcttccaagaaaagttctttgttcaaaaacttgtgctattcatctttttcattctcttctccctttgccaaaagaacgaaagactaactgcttgaattcttttgtgtttctcttctcccttacaaaagattcaaaggactaaccgcctgagaattcttttgattcttccctttcccttaagcaaaa

SEQ ID NO: 301997 - DNA, 338 bp, Glycine max
aaaatttatgcttaagcgacatataggttaaggttaagtgaaaattcatgttgaacactttattacatggtttttgaatgaatttaattgaacttaaatgtatggggattatgaaattgctacaattggattctacagctatatgttaggaaattcacatttttaaggattgatcacgtgtgaaagttacgattcataatgtggaatgccttacaaagcttatggaactactaggtgggttcctaagtgtattgtgtaaaaaatggcgaatatataacataaaggggaacttgtggtattaaagctgattgaatgtatacatgcatacatgacattac

SEQ ID NO: 301998 - DNA, 407 bp, Glycine max
agcttccttatttcttcagttgccgggggcggtccttccaaggacaaaactattggttgtgtcgtgacgttgggctgaggcaatgtgctgggtgccggtcttttgaggatcgggggatagaactcgacatcccttcgagcatagtcttgagggtcttcgtggacctcgtcgggctgttggggaggctctctttcaaggacaggagaagcaatatggcccgcatcgtcttgcatgacaggaggtgagtagttgggcggcaatccataagggtaagccgctcggttgtatcccagatgagggttgccatcatgccccagcgtgttccttccccatcctactatgtttgagggaggatggcgcgcggttgccaagagagttgggtctgctttggcagccgaactgacagc

SEQ ID NO: 301999 - DNA, 309 bp, Glycine max
acatatactgtaatcgattactttttgttttttcagaaaacattctcaacagtcacatctttttatctgtttcttaaatggccatcaagggcttatatatatgtgacttgagacacgaatttaacaagagtttttcagaacaaaaaagtcttatcctcttataaagcaaaatcggtttatcctcttacaaattccttggccaaaacacttgtgattcaataaggaattatttgagtgctcaaattgttcaatctatctctttcaagagagatttcttcttctcttcttctttattctgaaaagggatta

SEQ ID NO: 302000 - DNA, 335 bp, Glycine max
  unsure (1)..(335): unsure at all n locations
agctngtgttgnattttcatggttgacgtgccgctttgaggaagaccagataagatgaaatggacgggctgtttagtttgcacggcgtgctgaaacagcgcgaggagagtctcaataggggtgtgaaagagatgcancatgagatggatgctttggagcagcagttacagatggtgttgatgaatactgatgtnttggaagggtggttgatggataatcaggggaagaagatggccggtttggagaatcccgaggatgcttttgagtgtgcggatgtgctctccaagcatatgcttgactgtactgctgctgatttggcgattgaggacacgctt

SEQ ID NO: 302001 - DNA, 527 bp, Glycine max
  unsure (1)..(527): unsure at all n locations
nccccctgttgcgagttcangtagttcgcananctagannaataagccccgcggaaaagaccggggctttggggcttcatatatataatttactctttaganangcaaagngnctntggaaagttcgtagtctttgtgctagctctcaagacacgtgggttcaacggtgatgagacttttttttttcttttttgcangctggcaagataagacgaaaagaaaaaacgcccccntcttagatcttttgcagaaattgcattgcaaattaaataaatccctctttgtttccattaagaaaatcttacagtgaagaaaagttgaaacatttctcattgggtaagcataatgctgatgctggaagtgatcactacttcaattaccgaacaacctatccaactaaaaatcttgtgaacatgatatgaggttatataaaacatatttcaatactgcgcagttcagtattgcttgagtaccaaatttaccctcggattatatgataaccaatatcatggtctgagaatgaaaag

SEQ ID NO: 302002 - DNA, 318 bp, Glycine max
ataaatagttgtaaagtgattggcttggttgggcaccacttgtgctaaattaagcgttattaataaatcatttgccttttaaaaaaaaattaaacttcaccaggaattgaaatcatgcaagtcggtgacaattagagcatctaacatatcaatggcgacaatatttgtactcccttgcttcaaatataaggaaaaaatatattctcttaatctcaaatataaaaaataactgatttcacactattaaatagcactatccctctcgaacatctttgatctaattgatgtcctaattacaataactatactttatcatta

SEQ ID NO: 302003 - DNA, 292 bp, Glycine max
  unsure (1)..(292): unsure at all n locations
atgctctttctcggcatcatgcattactttctatgcttgaaacaaaattgattggtcttgaatgtttgaaaagcatgtatgaaaatgatgaaacttttggagaaatttttaaaattgtgaaaattcttcagaaaatggtttctttagacatgaaggctttcttttcaaagaaaaaaaattgtgtgtgcctaaatgttctactagaaatttgcttgtttgtgaagcacatgaagganggttaatggngcattntggggtccaaaagaactctagaaaattacaagaacatttt

SEQ ID NO: 302004 - DNA, 398 bp, Glycine max
  unsure (1)..(398): unsure at all n locations
agctncttgtttactcgctcttggtgctcagaaaattcaaannacanatccctcttattactaggctatttgaattctttagttcctgaatgtacaaccttcanattgttgctcgttcccctctttattntctggcaaaaataaaatcaatatcaaagaaaacagagaattgtcatggttattattactcgaaccagaaggaataacatctaaacaagtcattntattcttagaatgtgaaaactctgcatatttatggagaacatggngtatggaggcacgtaagtatgtgaataccacaagtcattntctccaattcaagggattgattaattgctctaggaaaaaaacatacatctggtatattgtttggtttgcagctgtttggagcatttgga

SEQ ID NO: 302005 - DNA, 225 bp, Glycine max
tggaaaaaaactggtactagtgaattataacccctgggcattcttatcatcactcaagttgctatttgcattattttatttgtttcctactaaaaaccaaaatcataaaaatattttaatcctctttttaatcacatcatctggtaatttaataaacttgactaattggaaatacaatgggtcctttgggttcaatatacgaaattttgagttcattgttactac

SEQ ID NO: 302006 - DNA, 494 bp, Glycine max
  unsure (1)..(494): unsure at all n locations
agacaaccggagttttgatgattcttttgncncncannnnannangaacancgggcacctgtacaacgacctgccgcgtgcgagcacgtcttagtttttctcaacaagcacagacaccccgggggcgttactttgattaacacatcccacctattgaaccgactttagatgttagtcttgaataatggatggacttatactctatactctgtcatgtgctgctttatgcatctaacatgtggaaagtagaggtttgcacccattgaaattgtgggaagccctattgttttattcaaacagaacatatatagtgcttggcgagccatgttgtcggttttcgtgcaccttacaataagcgcacattagcaaattctgatagaattggctcctacgctctaccaatgattttgcaggtttattaaaatcataagagtgcttcccttgttataactatttatcttatccacgtatcttcctgaatcaggccccgtacn

SEQ ID NO: 302007 - DNA, 299 bp, Glycine max
  unsure (1)..(299): unsure at all n locations
tcgcccttcgactgcacgtttctcactgatccacccnatttgcttcgcttagcttcgatcacaagaacaaaccctaacccctttttctgtctcggatcaacacaatgtcacactgtatccgcgtgtgtgtgtttaaatgtgcaccttttgggatactcggacgcgtggctgcgtgatgggtctgggaaaggaatatcacacaatccaaactcattggataataagcccagtctatcaggcccaagaaacttacgagttgttattctcactttcgtattagtatttgcacccatactttc

SEQ ID NO: 302008 - DNA, 402 bp, Glycine max
  unsure (1)..(402): unsure at all n locations
agcttcttttggaccttgaacattcaatcaactcctctntcagaaccatgctatgtgctcgcgactggtccctttcttcccttcgcaacttgagttcattattgctaccccatagagctccgcgaaatttgttccggccatactcttccttgtgagccctcttggtctcttgttcaagggctcttgcggtaattgcattctcttcccgtaacccggcacactccttccgaacgtgtgtagcagccaacttgaacttctccttggcgagttttgcctttcctaactcgcttttgagagcttggacttcttcgtcctcttccggtgcttcaaaattctcttcgctgacgactnttaacttggcgagccaatctaaacctcgtatgcgaactttcagccattcgt

SEQ ID NO: 302009 - DNA, 580 bp, Glycine max
  unsure (1)..(580): unsure at all n locations
agcgctgtnnnnnaactgatntcattgtatcaccgtgacacnctangaatanataagcctntgaggggtgcgtagccccacccatcttnnttcatagtagaagtatcttatatatgtgttcntacncatcacgaantattcgtcgtcgcctttttctatctattgnnggggtacnncacanntgggccccgcccagaaatcccttccacnccttttanagcnngtgnnntctttgaaaagatcacgcttccccctctttcttgcaaatggttctatatattgcattcctattccggaacccatatcaaaatatgtactgatacttgcctaaccaaaggcaaccatataggtcctctccaagaatggactccggaagattccaagttagtgtaccacgtaacagctaccccagtaagactttcttggaaggaatgtattacacattctcatcttttgcgtattcccccatcttctgacaatacatctttatatggttcgttgggaaaagaagtcccccttttccttgtcaaggtcccagcaccttggaccttgggaggggtgatgatattgtggtctaggn

SEQ ID NO: 302010 - DNA, 276 bp, Glycine max
agttatggagttccttggctggcagaaatttacttggatagacctaatggcgcatctagaagcgacttgcaggtcctagtttctctgaaggcttgctcatgcccacacattcaactcacttgcaggaatttccggatcatgccaattgtcttcgtctaagagatgatgggcccaacctttagacatggatgctgtacttgatagcattaagaaactgtcatcatgtggactcatcgcagcaggaggagtcatcttaaaaaaatcaaatgagccact

SEQ ID NO: 302011 - DNA, 277 bp, Glycine max
  unsure (1)..(277): unsure at all n locations
accggcaaaagaatcaagtggttcttatatgatgacaattnaattatcctgctgtgatgaatgggaagcctcgggaaaatggacagaaggagaacgagggaggaacccatgctgtgactgtcgttcctagatggccaaattccccactaactcaacaatatcaataatcaggccaatatcaacccttctcattacccaccacctatcaaccaacaatgctctataagtccacaaatgctacccctagatcagccactagacccacctgccacacata

SEQ ID NO: 302012 - DNA, 485 bp, Glycine max
  unsure (1)..(485): unsure at all n locations
aggannagagcnncaggtgactgatncctgaaaaactgnannacnggnaatnggcaaagaccncnanancgaccngcaggcngcaagcnngntttgnanttttgtnaacaccccacacnccgggggcagggagagattcaaacaccaccccaccgcccgaaacaagnacaaagttnggaagacaccaccatcacaaagggaagataacgccagggagacgccacaaggaccaccgcgggaagcccgaaaaaagggcaacaacgaacccagagagaagccccagaaaaaaatgcgaaagccaaaagcccctgcaaggaaaacgagcccacacaaccacggaaacgagcagcagcggaaagcacaaatgaaatcaatcaaaaggaaaaacgaaaatacaaaagagatggaggggccagccaaaaagctgggccacagggagacaaagaaacagaacgaaaaacaactggcagggccgcccaagcact

SEQ ID NO: 302013 - DNA, 303 bp, Glycine max
  unsure (1)..(303): unsure at all n locations
tgctcatttctgctccaaatcgcgaattgttatctttttcggagtcntgaagtgcgtggctacgagtgtgacttcgaaaattcaggtttgggtggacttctttctctcttaaatttcgtgggtatggggttttgggagatatgatagggtggtttgttagatttctgctgtgtaatgattatttgtgaaggaacttgttgaaagcttgttgaaattgccatgtttggatgagttagacatacccattctgttttagggttttgtgatgatgtttatatgctgaaattgcctatggaaactgtt

SEQ ID NO: 302014 - DNA, 636 bp, Glycine max
  unsure (1)..(636): unsure at all n locations
tgannttcatacccncncgcnnnccggggagtaacggattcacnacnnatngncnacnccanggnngaattngnagctcggtacgccggtgatccatctagaagtcgaccgtgcagcgccagtgcaagctttgtacttatgttcgtatgagcaatntncaatgaacgttgcatgaagggattnttatcttcatcaacagcgcatntcatcatattaacactatagggtcccttcactagagtctatcgatttcaaagaatgtngcatcgtgaactagtctgataacatgtctgctttcttaaatattgacattttgacatgttagcgacaatagcaaatagataatgtgagagcaaataacagtcttcacttaattgaatgttcataagattcgagtacatgacatatctattatatgaggtacttgcaagcttgtaacatgcgtgcatatcgtgagctaaaatgacttatctatatcttgtttatacaataatagattataacacgcatttctttggaattttgtatgatagcatctctgtacaaagtaacgatcgatccagtactccagaatgaatgtgtggcttatacgtggggcatacattcttacgaacatgaggtntggaaggtgttctg

SEQ ID NO: 302015 - DNA, 339 bp, Glycine max
  unsure (1)..(339): unsure at all n locations
tatcggaagtggaatttctagataactcttaaacctcttctattacacttaatntgcaagagagctaaattctccaatggtcatcctccaattgcaactttggtaatattcaagaaaaatattatgtagtaattgatttgagaaacatctatanaaataaagtcagttgaaagattagagataaatttagatttgtaccttgattgttgataatctcctttgctcatgtaaaatgccacccactaagaatactcatgtatgctgccanacatgngtaggtctattgatacggttagaaatcaacattgttacaaataactttctgaggtaatgacttga

SEQ ID NO: 302016 - DNA, 412 bp, Glycine max
  unsure (1)..(412): unsure at all n locations
agctttgnatggtataatgtgtangacacccctatgttggtcagagctcgaaaaaagccttaccttatgaccagaagtggtacatcaaaccacaaagaaggtcaagtttatccaagaaaagatgacgactgctcanagtatgcagaaaagttatcatgataagatgatgaatgatcttgaattcgagggtggtgatcatgtattcttgagagtcactccctggactggggtttgtcgagcattgaaatcccgaaaactaacacctcgctttattggtccatttcaaattcttaagagaagttgccctgtggcataccaaattgcattaccccgtctttttctatcttcacaatgtctatcatgntgtctcaactcataagtatatccctgatccatcccatgtgattgaatt

SEQ ID NO: 302017 - DNA, 407 bp, Glycine max
  unsure (1)..(407): unsure at all n locations
ncccacgtgagagataccaagatctccggcacttagataacatcctccgagaacagatgatcaagagtttgatgaaactaatatttgacaaaaagctccaagtcgggagcttttgtgantacaagatgatgatctcagaatcaagaatgagntcagatgaatcaagacacttcaggttcaaagganattgattcagaatcagaatcagtttcagattcagtccaagatcagatcagattcagatcagagagactcatcagatagtttaaaaagttttcaaactggcagccatgatttctcaaactttccaagagtttactcttagtatcgatccagatatgtatcataccagtacaaatgtttcaaatgacttacacgtgaatcgaaaacatctcggagattaagcg

SEQ ID NO: 302018 - DNA, 390 bp, Glycine max
agcttcatctttctaatattctcactaaacctttggctgaggacaagtttaaatttattgaatctttaattaatgccaaatgtttgactgatctctaattaagcatgatatttcatgtttatgcttttgattgagcgaaatccatgcttgggtgctaaatatttgaaaaatttgatgtacctcgtgtttgcttaactaaattgggtgttgttgccaattcctattacatgctcattaatggtgattatgtttttaccattcaaaatctatgtttttctgatatatctattctttctccttggctctactatataaacaagtgtgggtaaacaactaatcacaccactcacatctctctcaatttactctctcctcttgcctctctggaac

SEQ ID NO: 302019 - DNA, 277 bp, Glycine max
atcctgatgatggtgtaccatatgttctcatgattggactaatacatttgctgcccaagtgtcattgtcttgtgaagatcctaataagcatcttaaggagttccatattgtttgttccaccatgaagccccctgatgtccaacaagatcatatctttctaaaggcttttcctcattctctagacggagtggccaaagattggctctactaccttgctcccaggtccattttcagctgggatgaccttaagagggtgttcttggagaaattattccgt

SEQ ID NO: 302020 - DNA, 412 bp, Glycine max
  unsure (1)..(412): unsure at all n locations
ggagagacggcccctgatcatgctatntctgtanccccgnatnngcangaccgggancttaagagggtgagcagnttttgngtgnntgnaggnnnaanaggnngagnaattttaaaannnaaccccccacgcggggcaaaaaacgaaaccgcaccgncaaaaaggaaaaaggaaaaagaacacacaaacacgcagaggcaagacaaagacaaccacaaaacgagaaaacgaacagcaagcaaagaaaggaaagcgacgaaaggaagaggaacaaacacaccagggcgccganaaaaagaaagagaggaggaccaccagacaaaaaacacaaagaaccaccaagagcgggaacggaaaaccaaccacgggaccacacacaacaacaccacgaagacaaacgagaaagaagacg

SEQ ID NO: 302021 - DNA, 410 bp, Glycine max
ttcttgtatgattatggggtacccatcacatgtggtactaggtggcggtcgggcgatggtgcacaacaagttttccacatccacaatgcgcgcataaacccaccatcccctgttgcccacctccatctaagctcacgtactcccatgtagcccatatcctcatttctctcaacaccgggtccccatcaatcctctcaagcttccacaacatccaagcaaaacaacattcaaactgcacaagctatcacagccaagcaaaacagagcataggcagaaaactttgccaaaacaccaaccaaatcacagcttttctcacttaaagaccccagtaacaattccttcgttctggttcattaaccgttggatcgaactcgaaaatttactggaagtctctaatacttaagcctaca

SEQ ID NO: 302022 - DNA, 370 bp, Glycine max
  unsure (1)..(370): unsure at all n locations
ntcaacatcagggttggggcagcanggacatgaaagtatctattctatnccaatnctctccctttgnctttgtatttagtatttttttaaaattgaactaacattctatgctcttaagtttggcttcttttcatacttgtatataaatgtaaggtgtccctttcatacccccttttgtgttgcttggacatgcttgtgagntttttgttttccttttctctttntgataatttgattggacatgcttgtgagttttttgttttccttttctctttntgataatttgattgatgtgtgagcaatgatggttaggaggggagaaaaatgtctgaattctgagctatggcatgcatgcacgggccccttggtg

SEQ ID NO: 302023 - DNA, 169 bp, Glycine max
cgacatcccgcatatgtgttgttttatgacattttgcaagacaaaagcttattttatttttggttcaaccttctttatgagtctctattgcatgcaaggaaggtggaagagcacactacaggtgcgaattttatctgaaaactccatgaatacagggtccttttctttg

SEQ ID NO: 302024 - DNA, 337 bp, Glycine max
atagttaagaagacccgagtaggaatgagttgaatttatctatgaagcatgaaattagccgcagccattgaatcagtctcaatccaaagctcctttaaattaagctcccacgcatgctccaaagcagtaatgagcccccaaatctctactatcataagagaacaacaacccaatttcctggtaaactcgtttatccaatggccattaccatcacgcatcactccaccacagctagccttctcgccaacatctataacagaagcatcaacattgtacttaaaatagcccactgaggcaaccaaacaaaaagcctatccgcagaacaaggttgcccatg

SEQ ID NO: 302025 - DNA, 202 bp, Glycine max
ggcggtgctctgcccgatgatccgaaagacgaagttgttcttggaacgcgggatccaccgacccacagctactacgctgcgggaacctccccataggaccacaactagaatcaagattactactaaggccagccatgattacgacggtcttaccgactggaggtaggcctgcccatccgacgctaatacagtggacgtactc

SEQ ID NO: 302026 - DNA, 277 bp, Glycine max
acaaatcaatgcggagacatttttgtccatgcaaattcgctcactttctataagcttctgcttattagtgcacagctccttcaataatttaccatatcttggaatttgctttattgcatccaacaggaggatgtttacctctacttttctaaatgtttccaagatctctttctctgcctattacacatttttgttgggaactgctcctggaaggaatggaagatggatgtgctgcttctgccaatctcaattaccacgggcagaagattcacctgca

SEQ ID NO: 302027 - DNA, 356 bp, Glycine max
accattgtgttgtggtgcatatacagtcgtaagctctcttcgaatgccatgttctgcacataaacatttgcatattcttgtggagcaatattcatcacctcgatctgcgcgaagagtctctatagactttactagctcattatcaacacttgctttgaagcttttaaatgtacaaaacgcttccgattcttcctgtataatataaccgccatgttttcttgaataatcatcaatgaagcatattaagtatctcttacctccattagaaaatgggtttattggaccacaaatatcagaaagcaccagctccaagacatctatagctctccatgactcttctttgcgatactgagatc

SEQ ID NO: 302028 - DNA, 255 bp, Glycine max
ctgggatctcaatcaggtctggggagtatttaaggtcacatatctttatattcacaaaattctgtaacaagaaaaaaccatcacaatgttcagaaattattaagatgctaatcacggccctaactaaaagaaaaatctaatcattcagatgagaaaagggtgaatagttaaacatagaagaatcgtatatcgtgcattagtatacacattgttagctgaattatacatttcctaagggactatgtgatatagacc

SEQ ID NO: 302029 - DNA, 377 bp, Glycine max
  unsure (1)..(377): unsure at all n locations
cccaaggcggagttgttgatttttgacacannatttggnangggcgcgaaagcgacggggcggcagggcagttaattgctacacgagccgaacacgggggggtacgaacnnaaaacaaacaccggacacggagagccaaccacccagagggagcggccgcagagaggagaagacagggccggacgagaaccgcaacacgcaagaaaagcggcaaaacacacgaaacagggcggccacacgagacgcagacgggaaaaaagcgcagacccggcgagaaaaaggggaaagacgcgaacagaagcagggcaggcggagacacgaaggaaggaacaagcgcaacgaccggcgacgagggacgcaagtgggaaagacaagan

SEQ ID NO: 302030 - DNA, 479 bp, Glycine max
  unsure (1)..(479): unsure at all n locations
naaaactgttttaccccagggatcgnnagnacganacnnnnnnnttnggnnanacaaccccggccanggancagnagggataaattgtccaaacanctaagtcanattatgaggaaaatgctaagacaggcaggtgcgggcatgtgtaaaaagtccgatatgacatgatgcctttanatgtagaaatagttcaattatttccaaaaccgaaagatgagtctttaagcattgatgcctagtctgaataattcaacattgtatcaggactgattttcactaataacttaccgcttgtaacggaatatatgtaggtgttgattattctaacacacatgtgaacattagtgtacaaatggattgtgactacgaagagtagacagagcttctttgcctgtgaattaaaagtgcactcccaccaagcgtaaacggaggccttgaacaataccttctgtgatacaaccgactctaaagtcatacac

SEQ ID NO: 302031 - DNA, 504 bp, Glycine max
  unsure (1)..(504): unsure at all n locations
ngccaagcagaagcgggtgttgaccgatcgtctgcannacacnnaanttngnanccgggatgcggtgnattgaactgcaagcatgcgaagcgcgattttctttcttaccttccttagcctcggagagcgagggcgacaaccatcagtgtacccatctccacttttggatgctcagtgtacgtaacagagtgccggcgaccatccttgagaaagagcttaaggactacacgaacctatcaacgaatcctgaggttcataatgatgtgtatgttgagcgaaaacaccagctagcgccctatggctcctaccttgccttcctcccacgaccactgtatatagacgcatcacctacactaacaccatcgatatcaccgaactctccacgaccatgatcaggacgggttagcactatgtggaaagtgatgtgtagtcgtaaggtcatggtcatgctaccatgagtcaaaaaagtgctcgcttgtatgatcattactattggataagggg

SEQ ID NO: 302032 - DNA, 233 bp, Glycine max
  unsure (1)..(233): unsure at all n locations
acggggctccacttcttgctctctccttcaataatgataccctctanagctccacaaattgctcatcatttgtaccccaaattgcaaaaggaacccattctctgagtcgtgaagcacacctctacgttgtggggcttcaaatctcaggaatgggtggaatgcttctacatgaatctcgtgggacttgggatatagggagatatgacgcgtagtgctactacgtttatgcctta

SEQ ID NO: 302033 - DNA, 325 bp, Glycine max
  unsure (1)..(325): unsure at all n locations
gcaccgggttgatgatcctganctcgaatttagtagtacaacnccncgnaggggaggcggaactttctttacctgttgacacacggggggggtgggtttataacccaccaccccaccatgaagatgccaggtggacggctcgcttcccacgacgctgagtgtggaacagacctagtagagcgaagcgtagctacaaggtgggggacaagaccaaaggaaggaaccactcgtggtgagcggtgggacgccgtcgcggggtaagaggaatgagtggatcgctggaaggacggaactcctaactaggcaccgggcgcgtgtacggacc

SEQ ID NO: 302034 - DNA, 501 bp, Glycine max
  unsure (1)..(501): unsure at all n locations
agcagagagacgagcgntttgttgcattctttganacctagnanaactcggcnaganccccgggatcctnagagacgacctgcagggtgcaagtttgttttcaacttttctaacagnnnngagccagaaaatagtgccgtaaattactcatcaacacaacttggggaccaatgatacccactattggcgtaatgcttgacatacgatgacattgggcctggtgcatttgatggtacccgagcatcttgtgaaagcccgattttgacatccttgaagaacttatatgaaacatacgaccacttgaaaaatgttgctgaatgtagccataggttgatcatcacaggtcttattggttgtaaagactaataaactttgatgtgcttgaaatggatgggaggaagctatatttataaggtcaaagatactttaacgtctaaatgtgaactggccggtcttgatatgtttaatggagaagtaatatgtaggctaatatctaatgcg

SEQ ID NO: 302035 - DNA, 256 bp, Glycine max
  unsure (1)..(256): unsure at all n locations
aaagtatcagatactctagcacatcagtgtcatcnctgtttattagaccaatcaaaacctgcggtgaatctgcctgaatgagacactctgacagacaaacatttccatatagacttaccatagcctcaaggacacgctcttgaattagttcgttgtcctgaggctataaaagagtcacgaaaatatcctttatccgagttgcatcagaatgttcctcatcggcatcgactatttcctctaagaccgtgagtgcata

SEQ ID NO: 302036 - DNA, 366 bp, Glycine max
  unsure (1)..(366): unsure at all n locations
actttgattgcttattcaatggagcngacaagaataggtncagactgatcaacacatgtacagtggccaaggatgcttgngagatcctaaaaatcactcatgaaggaacctccaaagtgaagatgtccagattgcaactattggccacaaaattcgaaaatctgaagatgaaggaggaagaatgcattcatgacttccacatgaacattcttgaaattgccaatgcttgcactgccttgggagagagaatgacagatganaagctggtgaaaaagatcctcagatccttgcccaagagatttgacatgaaagtcactgcaatagaggaggcccaagacatttgcaacatgagagtagatgaactca

SEQ ID NO: 302037 - DNA, 251 bp, Glycine max
accgggtgttctgactgaatggaaacccgactaacacgcgcgccttgttcttttaacccggcggatgtcttacttccatgactggggtgcaatgtggcagtgtaagacgatactaggctatctatcctaatactaagtgatgtcttctgaaatgtctcctgtgatgacaagcaaattactaagaaaaagaactctaatgactgttagccttggtgaacccaagtttgctcgtaccgttacatagaatgggc

SEQ ID NO: 302038 - DNA, 496 bp, Glycine max
  unsure (1)..(496): unsure at all n locations
nccacacgtgaaaaaaacctgacgnacgacnncnnnntngataanaaccccgcatggagacacatatactgcgatcgatagccaaatttttttttatgagatgcacacaacagccacctgcttggacgagggacaagactagggtctcaaaggacggtgataatgagagagaagaccctactatgactacagttcctatgcacacaaaggtaccatcctcccatcaatgtacatactcagcctatcacacaaattcctctgccccaccaccctgtattccatagaggccatacctgagtgctccacatggtctgtctatctctctaccgatagcataacccatctcttgctcctacctctgcaccaggcttaaaagaaccgtggtcctctaatcgtggaagattccccacacatccgagggactgtgcttgagtggctctcacttgtactcggaaattctcatggatagcgttaacccctggctgggttgcctggg

SEQ ID NO: 302039 - DNA, 363 bp, Glycine max
  unsure (1)..(363): unsure at all n locations
agcttatgttattgacctccattntcaactctaagcttgattttcacttcattcttttgctctattctcacttgtaatttcaaaaccttattttgaactctttaacgttggaaacttgaatctcaactccctcattcttccttataaacttttataagcctacaacatgtaaagggggtctcaaactcttgaaccatgtgcttgctgttgaacttacatgaacatgttgcttccaaatttttgagcttgttgtcatgtcctgaatctatgtgctgagttgctttccttaagttttttatgccacaaatgagttctttgcatgttaaaacataaagttagcctaaaatgtcacccaaatcggag

SEQ ID NO: 302040 - DNA, 433 bp, Glycine max
  unsure (1)..(433): unsure at all n locations
gcttcacaatctcccctttttgtgatgacaacccttttttcttaaacacatacacatactttttcctagtcgattattcacttaattctccatattctccccctttgtttttgagtttaagcttcactttaaattaagttatttaattatatgagttcttgatttaatccctattttctctccccctttggcatcaacaaaaagccaaagtgcataagaaatataaaacatacataaatgattataatatcactagacatatatcatcaaaataattaagtttaaaactcataacaattaagagtaagtaaatataatcatgttcagttatactaatcaaatattaaaagaaatactaagtattcaaatgtcataanaatataaatcatttgggtaagtcactagcatcttgcagtcctaattctcttctaat

SEQ ID NO: 302041 - DNA, 426 bp, Glycine max
  unsure (1)..(426): unsure at all n locations
ncgacctgcaagtttgctatcnnanatttgcgccaacacangaaggacgcggacacggcgncccgaacaaancacaagccgacgaagagagcnncagacncggcnggggaggggggcancgcgaacccaaaccccagggagggcncaaggaccaccacacacacgcccgcaaagaagaaaccaacaacacacccgcccccacgggaagaacaaacnacanacaacaaccaccacggggacgcaagaccnagagggaagaccgcgaggcacngagcccgcacnggacccgcggcacagaacagagcccaaacaccaacaacgagaacgacaacgcgagcaaacggaccgcgagancgagngccggcgaacaagacggaggggaagggganncaaaccacgacccaaagaagacggaaggaggggccg

SEQ ID NO: 302042 - DNA, 504 bp, Glycine max
  unsure (1)..(504): unsure at all n locations
nccacgtctgtnccaggttcangacgntangcannnacgngatantatanaacacccangctncgatcacctaaggtcaagctgcatggtggntggtgctttttttataactgcctacacatacggggggagatcgatctgacaatacaattggacacaacatatgctacattactactcaacagatgcacatagaccctacctatagatgcttactaggcctgacgcggataaatataaacagagaggtcccttcatgctacaagcaacgctggaatctgaggaggatgggctatttcttctaagaccgtgagaggatgaccttcatgtgagattatcttaccatacgtcgcactaggacgacgagaacgaatacttgctgatgtatattctatccatgcagaggtgccacatcctatattggatatatctccagttcaatgctcctgctagacgggtcaccataagcttgcatacgcgaagtttagagagcaactatagctn

SEQ ID NO: 302043 - DNA, 401 bp, Glycine max
tttctttctacattatagcaaggttcgcattggtccattatactttacggctaaaatgggtatgtctctttgcccgataataagcccgagattatactgagtggacatgatgtacatctccaatgtggccttctagtatggataatcctctcctgtgaagcatggtgacctcatgacacatgctacctcaacaacgaattggatgttgttgttatcttccatcaggatcttttgctttagacattgtctggtgtataacctttataggctcagctctgataccaaatgataatggcaaatatcaaaagacgggtgggtggattgtgatattataaaattttacaaacttacttccttgaacataaacgttattgcatgatgataaagcacgttaaaacaaa

SEQ ID NO: 302044 - DNA, 406 bp, Glycine max
  unsure (1)..(406): unsure at all n locations
agcttgaattattttttgcaattctcgagtagataatgcactaccatctctgcacagaatcaaatctataggttaaaaataaatggcactagaaccacaagttcaactggattttagtcaaaataagtgcaaatggtgggaggcaacaacgtaacctgttaggagaaggtttgggaggctatacaaatcatcctgttggatatgtaattaatcttagtttagtccaagttcacatttaatcttagtgaggttcaggtgggatcagtatcctctcgtattcggnggtaacatgtacaatatataactaatataaagggaagtttgattntctatttaaatttctctcttttccttacagagttaatngtatactccgaatttctatattatttttgagcgagcatct

SEQ ID NO: 302045 - DNA, 379 bp, Glycine max
actaccggatttgtatcttggatgggtgattgtgttcttacatggagttctaagaagcaaggcattgtgacactttctacttgtgaagccgagtatgtagctgcaacttcttgcacatgtcatgccatttggctaagaagattgtcggaggaacttcagttgttgcataaggaaagcacaaagatctatgttgataatagatctgcacaagagcttgccaagaatctggtgttccatgaatgacagtagcatatagatacaaggtatcatttcattagagagtgcattacacagaaagaagtagaattgactcatgtgaaaactcaagatcaagttgcggatattatcaccaagcctctcaaatttgaagatttttgaa

SEQ ID NO: 302046 - DNA, 422 bp, Glycine max
  unsure (1)..(422): unsure at all n locations
agctnttcttanataatgttntccactcttanaagggtggggtgataaataatattaataattaanagaaagagaataaaatagaggaaagagttaagatagcactaacttttgcattattggttggatggttaagaaataagataatgaggaaaaggtcacgggttcgatcgcttttgctaacaagaaatcaacaaactaaccattaacaaataaagaaagagaaccgaagagtttgaattatgagaatgtaaaattttgacacatgtaacgttatccaagtatggtgatctcgtgatattnttcaatgaaggttggcgtatagaggctntttttttgttngcctatgactctctatttataaaatcatatatgtgtntaatagaggcagataaactccttaatttacaaaataatataat

SEQ ID NO: 302047 - DNA, 409 bp, Glycine max
  unsure (1)..(409): unsure at all n locations
agctttgaatgatgcctaaatagtggtgtgtggtgcgggagacggtttttttcctctgcctgtannngngcgttaatgattttgggttttgacttgtgagagctgttgttttgtgcctgatgagtcttgaacttatggaaatgtggagattgtgttgctgaatttatgactgtatgttgtcttttgtggtgataggaatcaacaatatgggcagcgttcttttcacaagtactggcagtaaatgacgcgacggtaaagtttgagatttgggacacatcatgacaagagatgtagcatagcttggctccgatgtattacagaggtgttactgctgctatcattgtctatgacatcactagctcggtatgatatctttgcatttggatattgttgaatacctatttaaatg

SEQ ID NO: 302048 - DNA, 420 bp, Glycine max
  unsure (1)..(420): unsure at all n locations
agctntgattcaattctaacgatnanntaacttttactcgggatgtcccgattgaagtcccggtatatatctgacacgcctcgaaatttgaatgttgaaagctctgagccaatttcaacaacaataactttttactcggatgtccgatttagtgacgtaatatatcgtgacgctcaaatttgaatgttgaacctctgagccaattcaaacgacaataactttgtactcggatgtctgattgaatcccgtaatatatcgagacgctcgaaattgaatgtggaacctctgagccaattcaaacggcaataactttttactcggatgtctgattgagtcccgtattatatcgagacgctcacaattgaatgtttgagctctaagccaattcatacgacaataactttctactcggatgtctga

SEQ ID NO: 302049 - DNA, 258 bp, Glycine max
ctctgagcttcaacattcaatttcaagcgtctcgatatattacaagactcaatcagacatccgagtaaaacgttattgccgtttgaattggctctgaggttcaaaattcaatttcgagcgtcgcggtatattacgggactcaatcagacatccgagtaagaagttattgtcgtttgaattggctcatagcttcaacattcaaattcgagcgtcccgatatattacggcactgaatccgacatccgagtaaaacgttat

SEQ ID NO: 302050 - DNA, 421 bp, Glycine max
  unsure (1)..(421): unsure at all n locations
agcttaaagtatgttctagtcattcatccctacgagatgttgttgaagtattggcgatcagaattgccattccttggattatagggttgaaccaagctcaagcttttacaaaaaggttcatcaagtcaggttgaaatatggaagtaaccatcctgcaaacttggggcaaaagatgaatcgagtcacatcactgcttcgtctactgccaaacatatttaggattattgatgtccttgttacttccagtttcaccttgacaaagatgtcatggaccatgttgaaaatctaaattgattcaaccccatatcctgcgtaaaaattcgcaatacttcgactgtacatcattcgcatgcatccatgcttttcattggttgcattgctcattgcattctttccttgaaaaataaaatanaataaaatg

SEQ ID NO: 302051 - DNA, 335 bp, Glycine max
  unsure (1)..(335): unsure at all n locations
taaggcctgtnttcgtattcaaatcacatcattgtttcaaatgttgttcttttatcaagtccatgcaaaaacatctggatgcatttggtatttgggaaagtccttcattgttcttattctcaatgttttttttaaaaaaatccttttgttgtgttttgatccaaaaataagtttaaaaaatattggttgttgattctttccaaaacatgttatgttcaagaaaaattttctgtttgagtcccaaaaagagttataatctataactaaactaacaaaatatcaaagcagacataaactagtcaaaataaactagccgtagtttttcaaacaaaaaa

SEQ ID NO: 302052 - DNA, 98 bp, Glycine max
  unsure (1)..(98): unsure at all n locations
taggcgtaatcaacagacacgctaaaggctccaattactagccttataataaatacagcccgaccctgacactcatttcagtacgtgttgtaataccn

SEQ ID NO: 302053 - DNA, 421 bp, Glycine max
tttcgagcgtctcgatgtattacgagactcttcttacatccgagtaaaaagttattgtcgtttgaatttggttagagcttcaacattgaatttcaagcgtcttgatatattacggaactcaatcagacatccaagtaaaaagttattgtcgtttgaattaggtctcagcgtcataattcaatttcgagcgtctcaatagattacgggactgaatcagacatccgagcaaaacattattgtcgtttgaattagctcagaccttcagaattcaatttcgatcgtctcgatatattacgggtctcaatcagacatctgaggaaaaaagttattgtcatttgaatatgctgagagcttcaacattcaattttgagcgtctcgatgtattacgggacttaatcagacatctgagttaaaagttatt

SEQ ID NO: 302054 - DNA, 440 bp, Glycine max
  unsure (1)..(440): unsure at all n locations
agaggggacgcagcttgatcctcgctgaccnctgnannaaccanactttgagaggtccacagancgtcggggggaacaagtttttatgtggtttantccacanggagggcgggaatggggggatttacctagataatatcggcgtagaggaatcagtttgtattcagcaacttttgcgtttttgggcggttgatcaaattgatatatgatgagcacgcgcgggtgtgaattttgactaactataaggagaatcttatcttttctaaaaattaaaagacccaaactttgggtttaaagagtaaatttgatcttgttcgctgacctattagtgtttactgagtttgcacaaagttggactatgagatttcttggcagccttgatgatgagaaaaatcttaagtcgattttagcgaattagtcttaataggcagatatttatg

SEQ ID NO: 302055 - DNA, 395 bp, Glycine max
cctgactcaccataaaccttgacccattggtagtttgtcaatccttaccctcggaagcaaacaaagaatataggggaaatttccaatcaaagaaaaagagaaagaaaatttccaatgaaagcacataaagataagaatgaatattccccagtcaaagagtgggagaaagcaaaaagaagagaaaggaatattcccaatcatagaatgggagaaagttaacaaggaagataaacaacgatagaaagctcctgatcaaggatcgaaagacaacagaagaaatgtgcagagaggtctttgtgaccgacaatatctgaacaatacagaattgccaccatatgaacgataaaagaatgaaagggaaccacgacctagaatagtcttctacctttgattac

SEQ ID NO: 302056 - DNA, 402 bp, Glycine max
  unsure (1)..(402): unsure at all n locations
agcttcaattatatgcgttgaatgaaaaaacattgaatataagggtcacatttgcttggatgttgaaataaagtggaattccacctatttgatgttagatactactttgaagcatatgaaggcatttgaggagtttgaatttcatgacagaaaatatgctaatgagttaagaaaagggataggtctgccttcctatgaagattgngaatatgttgaggctattctaccattcttgagcattttctataaagtcactttgcgcatctcaagtatctcttatgttactagtaacatttacatgttagaggtggtaggtatttggcatggggttatggatttgcttaactctaacattaaagatagcgctacacataagatggctaaaaatatgaaagaaaaata

SEQ ID NO: 302057 - DNA, 137 bp, Glycine max
  unsure (1)..(137): unsure at all n locations
cataaatctaaattatcaaatgtactcaagacgaaataataataaaactgtncaaaaagcatggaaataaaaagcctgatattgacaatgatcctgtgtatgctcattcaagtccagtgctggtgcagatgatggat

SEQ ID NO: 302058 - DNA, 367 bp, Glycine max
  unsure (1)..(367): unsure at all n locations
agctttactttataagacaacacaaccaagttctgagggaactcgttcatctgaaccatcttcagcatttccagcaaacttgagggaatccgacgatggtgcatctgaagcacatatcatggcagacgagcaaccacaaagggttactcttgatgattactccagctctaccatgccgcaatttttcacaagcattgcgcggccgttagtccaagctcacaacatcacatatccatattccttgatcaagctgatccaaggaaatttgtttcatggtttgcccaatgaagacccttatgcacaccttgcaacatacatagaaatctacaatacagtgaanattgcaggggtgccgaaagacgcaatg

SEQ ID NO: 302059 - DNA, 229 bp, Glycine max
cagccttgcctttattttatctgtctttcttcacagctccttcagcagtgttagtgaagctgacttcaaatcccatgaattttttgtggggacgaggtgctgaatggaaaaacatcgcttggatggcttgcgatcatatatgtactcctagaaatcaaggatgtttgggtctcaaagctatcaatgatcttaatacagcccttcttattaaatggaagtggctgatgtt

SEQ ID NO: 302060 - DNA, 399 bp, Glycine max
  unsure (1)..(399): unsure at all n locations
agctttgattatataatttcttgattnctaaaatacccatttttctctccccctttggcaacatcaaaaaggccaaagtgcgtaaaatatgaataatttaatcatacacaaagcataatttgtaaaacaaacataaaagattctaaaacatacataaagcaaaacatgaataaaaccaaattgtaatgcaaaccacttagtcatatatcacaaaccataaatatcatgttcagtcatactaagcaaatattaaaagaaatactaagtgttcaaatgtcataataatatagccaaatacacgactagaaatcaaaatactattaataatagtaatgtctaaactgatggtggtggtggaggtaaatcaatgcagtcgcgaatgatggtgacatcttcttc

SEQ ID NO: 302061 - DNA, 345 bp, Glycine max
  unsure (1)..(345): unsure at all n locations
tataagttgtgataagttaatgaaattttgtggtttatcaagaactggatatagtctcactgatcaaaatgaaccattataactttttatgtttgatctttgtttatctcctatctaattttaagtgacatagaatttgaatttgattttgatattgaaaatctcttttattttataaaatagattttcaccatttgaatgtgtttttttgaagaacgtttgtctatttcgttaatgttttcatccaaatgataactntatttgcttttaaaaggcattaaaaaaaaattctaaaatgaccatntaactatcttttgtgatattngctttatactatatcatatg

SEQ ID NO: 302062 - DNA, 397 bp, Glycine max
  unsure (1)..(397): unsure at all n locations
agcttgatgtggaactngatctangaagccacatgtgacagagataaatacttataacttattcaagttagtgaaacttggcggtttgccaagaatcggatgtaggttatgtggttaagatgaactggtataaacatcatgtgtcttatactgattttctctttaaactaacttaaggtgtgaatttgatctttgcttttgaaaaaaactgatccaataacgctttgttagatatgaacaaatttgataaatatttataactctcagatagagtattagaacggaagacttcattagatgatgaactattgattctcagccatctctggcaatgaatgaacagttcaaaatgcttntcttgcgtattcttgataaagcagtgtgtatatacagatgt

SEQ ID NO: 302063 - DNA, 363 bp, Glycine max
  unsure (1)..(363): unsure at all n locations
tgtaatcgattacacatatactggaatcgattattatttcatattttcangaaatattctcaacagccacatctttatatgtggctcttgaatggctatcaaaggcctatatatatgtgacttgaaacacgaatctgctcagagtgtttcagaacagataggtcttatcctcttataaagcacaatcgttttcttctcttacaaattccttggccaaattacttgtgattcaataaagaattatttgagtgctcaaatggttcaatctatctctttcaagagagatttcttgttctcttcttcttcattctgaagagggattaagagaccgagggtctcttattgtgataggattctaaacac

SEQ ID NO: 302064 - DNA, 405 bp, Glycine max
ggcttgctttcttagtctagaccaggaagataaagtgatgtggacgacttggagagattttatgtgtgttattaatgattcccttacccaccccgcaatatcaagaagccttttcaaattttagctcatatttatatcctttggatccctggtgggatagctttgaaaattatgatcataactaaatttgatatccctaaacaggtggaaaaaatgataaaaggagcgaacaaacaggaaaaaaaaaaaaaagatagacacttcttaatgttttagattagattgctttaaatttgtatcggatgagaaagtcttacatgaacatttcgctcttactgtgagacccaaatcatcattcttgccccttaattaggcttgaatggaagatttgatctgatatatcat

SEQ ID NO: 302065 - DNA, 290 bp, Glycine max
  unsure (1)..(290): unsure at all n locations
ntatcaccattcccagacacctttagtcgaagctctcatgaatagagattggacttgaaatcttcaagtgttatggagtccttgactacactaagacaactcattaaattatcataagagggagggagagaggctaacaaaatcatcaccaaatcttcatcttccatcttgacaccactatcgcgtagctccatcagaacaaagtttagctcatcaagatgtttctttagtggcacacattcccttatttggaggccaaacaaacattattccataagcaacttgttgga

SEQ ID NO: 302066 - DNA, 417 bp, Glycine max
  unsure (1)..(417): unsure at all n locations
agcttttgtcttgtattctatattatatacaatgacaacaganaatttaataaatccgagctacttgcttagagaaaaggtggtgagatactttgccaaaaaaagagcccaacatcagcaaattagagaacaattacagaagtgttcaagattaagcacttgtagaactccacttcctgatcttcatcgccacagatcaaaatgctatgcactttgcctaaaagagttagacaaaagcaggaaaatacaacagctattacactattttcactaccttgacaaaaaaagttcatatagtaagcacttccgcagttccaagaaatttggtgaggttgaaaccttcagaaatcacggtttaagtctgcaaatgaatatcanaaccaagttgtcaagaatatgatcctacttagaattggg

SEQ ID NO: 302067 - DNA, 390 bp, Glycine max
  unsure (1)..(390): unsure at all n locations
tcaagtanggtgcctccttannnacctccattaattntttgctttaccccttctcttccattgttgtttcttcatttttctccatgtatctcctcacatgtcttgtgataaatgtttttaacatgattctttaaagtttccaccgattaaacttgctatagaagctagatttgattttctatggttcaaatttcttgttcttgaaccatgaattgtgttgagtttagcttcctttgagttttgtcttgttatttttttgtggctgaaacctagaccattaaattcttacaaaaatattaaagtataataaaacctcaaaaatctagagtgacttgttcacctattgtaagtttgtcatagaagtcatgtctagtcatgaaacttgtcaca

SEQ ID NO: 302068 - DNA, 408 bp, Glycine max
  unsure (1)..(408): unsure at all n locations
agcttgatttanatcttgatgctttggtcatcctaataactcagcttgccatgaatcanaagtctacacctgctgcaagagtctgtggtctatgttcttctgcagatcaccatatagatctctgtccttctttgcaacaatctggagttaatgagcaacctgaagcttttactgcaaacatttataatagacctcctcagcagcaaaaccaacaacagcagaataattatgaactctcaagcaatagatacaatccaggttggaggaatcacccaaatctgatatggacaagtnctccacaacaacaacagcttgtccctcctttctagaatgctgctggtccaagcaagccatatgttcctcctccaatancatagcagcagtcacaacaaagacatcaagcaacta

SEQ ID NO: 302069 - DNA, 304 bp, Glycine max
  unsure (1)..(304): unsure at all n locations
gacctaccaccacatcaaaacacgtcttttggtggggannnagccggacagagcggtcattattaacaccaccaccacctctttcctagggaccaacaccagcaacaacaagtggtgaaaagcttccatgcaagcaacaactacgatgcaagcctcttggcaatgaacctatctgccagcttacggcaactcaatcaactacaacatcagaatgccacccgcgggggcgacgaccgcaaccgctcctatggtttcatgggggagacacatccaagccaaacgaactaaccaacttaactaacac

SEQ ID NO: 302070 - DNA, 417 bp, Glycine max
  unsure (1)..(417): unsure at all n locations
agcccgaatatgcttgtactgttatnagcgngggaagtaattcttgttagtgatttttctgctacatagtcacttttttatctcatggctgttgcattcttttaccttagcaaaagaccagccatatgaaggtagttgttttcctattgctgtcaaagcagactaacaatatggagtgctgatttctgcttgttagttggaaggattggaaagcatctacattttccttctatacaatgttataaatcctagacaaagcctgattganattgcaatgcattctgctgctaattggtttctagatgtcataaaaatgtggttaaaagccaaaggaatcaatgtattagagcattattgaattgtagtcgatgtgtctcatgatatgngaaatgtttgaacttatatgtgccattgtgt

SEQ ID NO: 302071 - DNA, 436 bp, Glycine max
  unsure (1)..(436): unsure at all n locations
gcattagcaagctagagtttggttactatgcgaggaaatgcactagagcctagctgtgcgccgctaagtgagcnntgactaaatctttaacttatttttcaagatttttgcatcaagtttttctccaaagcacgttgaaatcttcttcttttaacttttgctaatcaaaaactacaaagatattaatttctttattatttcattaaaaacaccggtgaagtaaaaaaattgcaatcattcttagccaatattgactatcaaattaactcagattttgcaggtatcacaaggtatgttatgtgtggcttcattgagcataattacttacatcttttgtttgtttaagagttacaacatgctttntttcatatatcattattagagaggtggtcttcaagatgggctatcatgaaagaaccaaagaacattttcaaag

SEQ ID NO: 302072 - DNA, 359 bp, Glycine max
  unsure (1)..(359): unsure at all n locations
tatattgcgganatcattttccaagcttagggcatncattnagggattttaatgcttatttttaatctgaacaatagttgtgtgggggccaaccactacaaaaaaaatactttcaacattgttattttaacatcggtttttgataaaatcgatgttaacaaatgagcggtgacatttttgtaaataaactgattttgttaaaaaaaacccaatgttaacgtgacaatattaacatccgttattaaaaaaccgatgttaacgtaacaatgttaacatcgagttttgaaaaatcaatgttaacatcgtcatgttaacatcgattttacaaaaatcgatgttgaattttaatgttgtgtttt

SEQ ID NO: 302073 - DNA, 186 bp, Glycine max
cacactatatgaactaaacgtagaccagctgatgcaccctatttgatacataacataagtcatactactcttattatgtattgtacaactatacacatagcataatatgaaataaagcttaaaccattctagtacagtcattttgaatctcatcattaatatcaaacatctatgtgtgccacttag

SEQ ID NO: 302074 - DNA, 508 bp, Glycine max
  unsure (1)..(508): unsure at all n locations
nccctagtgnaaaggggattcccangcacnatcngannaatangnnancanncnccgcangncacaccatgtttactatacatacgacttttgttgctatctatccgcacgaaaagaagggggggtgttatgtgttgtaatgcaccccccaccccaaaaacaatgtagcaaaaagtaatgcttaagccaatccaagcaagacattttgaatctcatcattactatcatgcatctcaaagaaaatgaaaatcatgcatcgatgtgcatagctcaacagtgcattacaagaaaacgtgccttctaagccgaccaagggaaaaatgtatgtatatgtgtgaacattgttcaaaatataacacatatatataaagatggcggagcaatctagacagatgcacaacacattccataaatatattctgaggatgatgtgtaaggaaatataataaagcatgggaggaaaagctgacgggcactagaatacgaaggtgtatgacaaatgacacat

SEQ ID NO: 302075 - DNA, 388 bp, Glycine max
  unsure (1)..(388): unsure at all n locations
catttgntttggtggttcgttggcaaatgatggttgagatggtggttggtgtgattgataacggcggatgtaaggtactacaacttcgatctagtttttttccgtataaaacttacaaattaataatccgtaaattatataaaacttatggattatcaatccgtcaattatatataacctacggattatcaatctgttaaaagacaatccatatgaattatgcgaattttcagtaatccgtatagtccatacggattctcaatccgtataaaccagtgcttaatgctaaagaagaagagggacttacgacggagacgatggcgaagtcggtgtcaacggcaagggcactcactggcagcacaatgcggactgatgcatgaaaggtgac

SEQ ID NO: 302076 - DNA, 434 bp, Glycine max
  unsure (1)..(434): unsure at all n locations
taaccaattctcattgcaatcctcattatatntatgattcttttcggtagttnttctggtaactggttagtatagctctacaagtaaggatatacagtttgaagtaggtgtagatatgttttcttctactcctctctttttatctttttttatgtgtgcgtgcgtgagtgtgtggcatgagatcctctcatatgttgtcacttatcattatagagaacggctgctctagaaagatcaattagggagaaagtcggatggcagaaattcataaaaagaggagtgcacacactaaggaagctacagtaccaggtttttcttttagccgaagtttgtaattgccttgcaacattgtattatgagactcgatggtcttgattctacttcagttgtgttatgttgatcctggaattgcagtgaggagatggaacaactca

SEQ ID NO: 302077 - DNA, 424 bp, Glycine max
ttatttttacatttatgacaggcagcacgcgctgatgcgcaggtgcctttactatccacctcactgcatgagggtgcaagccaagcactcgtcaggcaccagtaacaggcaaagagttgagggctatgaaacagacaggatctagtaagcgacagtgccgcacacactgtatatattaatgatacactcgaggcgtcacgcataaacaaagcctaggattacatgtaagctgtctgctcaatagaacaatcattgtaggcggaatcttatccaactgttatcagataaccgctatcgttcagaacgatcgagtccgtacatgtaagaatgctggtcgggccgaaaaatcacatgttgaacttcttcgtagacacttcatactatctaatggagctccttaacataatttagagtcgtatgacgg

SEQ ID NO: 302078 - DNA, 288 bp, Glycine max
gactggaatcgataccaaacatggaatcgattacactttttaaattaattggaacgtgtaattcatttgaaacttttcaaacatttgctactggaatcgatacacaattggtatcattacagaagtaaactcttggaaacatgtttgaaaaaatgtgctatcattttgaaaaactttcatacttatttgattgaccttctcttgatcttgatctgaacttgatctgatctgattttgaatctgaccttgatcttgatctgaatctgaacctgatttgactctaacttc

SEQ ID NO: 302079 - DNA, 192 bp, Glycine max
acgtaaatctgatagtgcgaacattctctcttttgttccctatcaccttgctgcacaattctatgtgtatgacaattctgcgccgctgcatctactactgctgttcctgatgggtcttcatcacttacataacaaactggtatcaagagctcaagtcgcgatcaaaggaattcaagattctcgtctgaatac

SEQ ID NO: 302080 - DNA, 420 bp, Glycine max
  unsure (1)..(420): unsure at all n locations
agctttgcttatntggtcttcgccagtgaaaggatcaatgtgggtccgaaaagaggcaaatttgatcatcctactaggacgactgagaaaactggggcaaataaaaagggtgaggatgagggagaaacccatgctgtgactgccattcctatacggccaagtttcccaccaacccaacaatgtccttactcagccaataacaaacctcctccttacgcaccacccagttatccacaaaggccatccctaaatcaaccacaaagcctgtctatcgcacttccaatgacgaacatcacctttagcacaaaccaagagcaccaaccaagaaatgaattttgcaacgagaaaacctatagaattcaccccagttccagtgtcctatgctgacttgctcccatatctacttgataattcaatggg

SEQ ID NO: 302081 - DNA, 291 bp, Glycine max
  unsure (1)..(291): unsure at all n locations
gagtcaacaagttcaagatcaagtttaatttcaagtttcatgagaagaaatcaagaagattcaagagaagatggaattcagattcaagagaaagaaatcaagaagacttcacaagggaagtattgaaaagatttttcaaaaaacaaacatagcatagttttggttttcaaaagaatttttctcagaattntctaagttactagaagttttactctctggtatcgataccagttcctaaatcgattactgtgcaagttgtttcaagtttcactgattgcatgttcatgattc

SEQ ID NO: 302082 - DNA, 325 bp, Glycine max
ttgcttcttgctttcatagggtattttgatctccttttggtgctctaaaatgtgggaatgtgctcaaatatgtggggcaattttggtttgttttcttgcttgattgggttggattggggggtttgtatgggatggccctatgcctatgatgcattttgaagcaatgggacatgccacattgtccccgttctcttgctagtgatacctaaacgcgcgcccaccaagtgttcggtgaaatgcctcaatggcattagcgcgtgacttttgtaaggaaacaacccatggaggcatttggtttcacatattctctatattttgggacatg

SEQ ID NO: 302083 - DNA, 293 bp, Glycine max
ccaagctagctaccaccccactaaaaaaagctcattccttgattgacttcatgataatgcaaaaaagaagtccctactacaaagactacccaaaatgccctcaaatacaaggctaaaaccctatactacaagaatggccaaaatacaatgcccaaaagaaggaaagacctattctaatatttacatagataagcgggctcatacttaacccaagctcgctacctaatttcgagcattctcaccattggcaatttcaaaatcatgtctgagcttaaagaaatacccttcgcatt

SEQ ID NO: 302084 - DNA, 410 bp, Glycine max
tttcttaatgtctcatgattgtcacgtcttgatgcaacaatgggtagtcatggccatacgagacattttgcctaacaaagtcaagcttgccataactcgactgtgctttttcttcaatgccatatgtagcaaagactttgatcttgtcaagttagatgagctggacaacgaggccactattatattgtgtcagttgaagatgtagttttcacctgctttcttcaacctcatgggtcacttaattgttcatctggtaagagaaatcaaatgttatgggccaattcatttgcattggatgtacccggttgagcgatacatgaagatcttaacagggtataccatgaatctacaccattcataagcatctattgtggaaaggtacatcgcaaaagaagtcattgaattatgtt

SEQ ID NO: 302085 - DNA, 406 bp, Glycine max
tagcctagatcaaatcgggttcccttctttggtatgttttgtttgaaatatccctatgggagagatgccggaattcaaattatcaacaacttcttcattaagtgtctacctattttgctatttcctaaattaccctcacttatgcctttaaacctaaatctatttttgacacagaacgcactcattctccgcttatattcatttggatcatatcagcacgcacactgtccatttcattacatttccaagctcaaagtgtagagagaagaagaaaaggaagaatggtgagttaaaaaccctatatctagttttcatctccacttgatttatactctttcattatcattttaacacctaaagtgactctgtattggctgtttgaacttacatgttcccattccctcat

SEQ ID NO: 302086 - DNA, 360 bp, Glycine max
  unsure (1)..(360): unsure at all n locations
tatcttattatatgacataagangcattggttgtagtgaaaagtatttatctattaaaataatcacgtttatgtgatttcaatgtataatgacgacaatggagattaagtttaagtcctattgcatctaatgtgaccctgatcgattctatattgtctacctatctaatgagtagttattattaaaaagaaatggcttttattgcactcttctatccttatatgctgattattttcagtgaataaattactattgtccgacctttaaaatctaagaatggttatcatcatctttcttatacacagtgcgataatgaatctcatgatgtgccttcatcattgagtccataattacagctat

SEQ ID NO: 302087 - DNA, 487 bp, Glycine max
  unsure (1)..(487): unsure at all n locations
aacaccacgtgtnggggaagtagancgcngcaacnnacgnganannatanaatactcaagcttcaggctgctcaattgcttagattgagcacattttgtttatggtctatgcggnggaccacagaggagcatgaaccacagagtctggcgacaggtgtagatttttgattcatggccaggtgggttaccaggttcaccaaggcatctacttgaccttcaatagtcttactctgagctgatgaagatgaattcttggctacttcatgcactcctttaatgacaatagcctcattattcgcactaaatcgctgagagtctgaagccatcttctcaattcaatatttggctattacctgcggcatgtctcctaaggcgtctacatagcgtgaacgatcatactcctctacacgaactgagcccatatataatatcgtaaaaagtgctcaatatttgcgggcggcactgcgctatttttaaacttccagtt

SEQ ID NO: 302088 - DNA, 466 bp, Glycine max
  unsure (1)..(466): unsure at all n locations
gccatgccaagcccttatgattttnttctcacnnccatcatagattaatctctttcttggaacagacnntctgatactttcattctnntgttcanaggtctatgaagaaagttttcccagaaaaaattttagggaanagaatgngannaaatataaccacannngcttgtagttgaaagtaccactttcctgttaataagaaattcnnccatttgtgcattcagaaaaatcttgcttcgaacttcgaagattnntagttgctggttgacttggtgtgaaatggttcanngctaccgattaagcattgtcattgttgccaagaacctggctcanaaatttttgctcttgggatgcanaagggttngctattgccaaatacaagacaagggatgaagaagaagtgagctcaatgtcttcaaatgtaaactgtctttgtctctcaggctgcaatctatcagatgaatat

SEQ ID NO: 302089 - DNA, 389 bp, Glycine max
  unsure (1)..(389): unsure at all n locations
aagatacacattataaatgaataaataaataatatacattactcgaaacagaacatgttaacaagcatacacaatattcccaaattattatcttgcctgtttgaaatcctcatcctgacttgtcactggacgtggttaatgaaagaaaaatgtacaatacttcaaacatattaacaggcatacacgcaatattcacacattatcttggcaatttgaaatcctcattcacgtttgtcattggacaaacactacggatatagccactgatatacgaaatcatattcaatgcctttgaaacatctggttgtgaaactgtaacaggttntgatataagggctgaaatttgaattccagaagtagagattaaacatatctcaattgtttcttct

SEQ ID NO: 302090 - DNA, 407 bp, Glycine max
  unsure (1)..(407): unsure at all n locations
agctngtttataatctcggaatgaagaatctccatatgcctgataaagagggaggaaaacaagataattcatctaagacctggattaatacgttgtgtctaaaagtaatcaagggattgaatcagaaaccatataagccaaccacaaccttaaaaattggcattgctccaatgtaaaacctgactgcatctgcataggcctccgacttgatgcacttgcttagtctatcgggtaggtcatatatgaactactttcaacaaaggtaaaaagtatgtcaatcatattccacttccacaaaagactcagaagtcataccactaagtcaagtatggaaacataaatatttcagtgatgcaaagccggaataaagaaacatgcatgattgctttaataattaatacctgaac

SEQ ID NO: 302091 - DNA, 412 bp, Glycine max
  unsure (1)..(412): unsure at all n locations
agcttcatctttgattagttttattaactntgaaggcatgaataacaataatccctcttgccaggaaaatcaagatctgaaattgagatatcacanattccttgtgaaaatgaacgtatctattggtatcacatcattcctttgcctattatactagctagcttgattccttccatattttgtaagtnttttttataatttttggttttgtttttggagcagtgaccattgtgctacttcatttactgacctttatcgaagctgccccaagtgttccattgaaatctgccttaactgttgcaaagaaatacgcaatggaagtatatcaccccggtctgaactgaagtttcaatatgtgaatagaggctatgattatatgcatggtggtgatcctttaccagtgtcttgtgat

SEQ ID NO: 302092 - DNA, 251 bp, Glycine max
ctgatagtgtggcaaggaataagagatgaatattgttgtgaatcaaatcacaaggatgacttctaacgacagcactgactaaagttatccgggtccacgcaaccttcagatcacagacgttagtgactagtacgaattgcagctttgaaccaaacttgggtggaaggtctacatcacaaacctatgcttgtgtatctggtgactactgacatccggctgttataggcttgaattgcaactatcagcactct

SEQ ID NO: 302093 - DNA, 423 bp, Glycine max
  unsure (1)..(423): unsure at all n locations
agcttcctctacatttatgtaaaacaaaattcaaacagcacaaactatcacagccaagaaaacagggcaaaggcagaaaactctgcccaaaacaccaaccaaaatcacagcttttcccacttaaagaccccagtaacatttccttcgtttcaatttgttaaccggtggatcaactcgaanattttactggaagtctctagtacataagcctacattttgaccgttgggatctgctagaaaacatccagaactcattctgcactactctttccacaaccagcaaaacatagtatttttctgcacttatgcaaaattctgctgcacaatntcacagcaaaattctgcataaagtgcagatttcgaaaaccacacttcccctcatccaatcttgcccaaatcaaatcctacaagtcccaaatcatg

SEQ ID NO: 302094 - DNA, 321 bp, Glycine max
  unsure (1)..(321): unsure at all n locations
tttgatttttggcttgttattttttggggctgaaacctaaaccataaaattcttacaaaaatattaaagtagaagaaaacctcaaaaatctagagtgacttgttcacgtattgtagttttgtcatagaaatcatgtctagtcatgaaacttgtcacataagatttcttatgttgngctgaattttattttcttgtttctttgtctaactcattngttcatgagtgtatgaaattattttagcctattattttgattgagtcaaatctttcatgttaattagtgcttaacatgttcatgcaaaattcttagagagtctttga

SEQ ID NO: 302095 - DNA, 512 bp, Glycine max
  unsure (1)..(512): unsure at all n locations
cccaganagaggggnnacctagngtctttgctagtnntcctagnannnacnnnnnnannnnnggnanaganccncgagagtctatgnataggagnngnangntttgatttataaatttgattggganngaaaaggagccagaagaggggcgcgctgtgaaaacagaacaaaaagccaaaacgcgagacataagaagagaacaatcacacgcccagcattattggtttaacaaacatgaaagatgctcagacccacatatatcaatacatggataaaaccaagattgcatgcgaaccaacttaacctgtatcacaaaccattatattcatgatcagtgttactcgacaaatgttcaaagcaatactaagggggccaatgtcataactatatagaccaagatacgactattaatccgaatactataattaataaaatatctaaactgatggttgtgggggagagaatcacgacatctcgatgaaggtgaatcttataatcacttgtatacttgn

SEQ ID NO: 302096 - DNA, 355 bp, Glycine max
  unsure (1)..(355): unsure at all n locations
agcttgtttgtggagcttctatggaggctggatctttgagcttcaatgaggtcctttaatggtgattttccaccatggagatgcagcggaatacaaaggagaagaggtaagaggcggcgccatccattaaagaataagcatggaagaaggagcttcaccaccaagatgaaccttggataagaagcttggagaggatgcttcaatggaggaaaagaaagagagagataaagagagaggggggagcacgaaattgaaggaagaaaaagggagagaagttaaactctgagttgtgtctcacaagactctcattcatcanagttacaaaaagtgttacacatgcttctatttatacact

SEQ ID NO: 302097 - DNA, 364 bp, Glycine max
tatcagatatcttgggggaagctccttttttggctattccctagtggatggcgcctctctcacctctttctttgtcttccgctgcatctccatgggaaaaccaccattaaggcctattgaagctaaagatccacctccatagaagccccacagcagcttcatcactacccttatggataccacctattacacgccaccacctgcatgatgacacgggtcatgtcccttccccgtcttgaagggacctcttgatgcggacagtcatgggacatagaagatgcccagagactcattctaccccgccccatcagggcaccccaacatatgctacccaactccactaccatatcttgcataaagaccc

SEQ ID NO: 302098 - DNA, 381 bp, Glycine max
agctttatctttacatttctctaaccatcccaatccattcgaatcatacaattgctacttcaaatcattctcaaacactcatttcatacagagcaatacactgcatatcattttcaatcaattcactgttcaaacacgccttttgtaacaccctgatatatataactatatattaataattatgtttgatgtttgattgtatttgttgagttatttatccgtaattatttcaaggaagctaatttatttaatataaaggcgtgggtagataaagatctatcttctcacaaaagcctcttgagacagcttctgaaagatgccacggcgaaacttgttgaggaaacctcttaatgaagcttattgatgaagctacatgaagct

SEQ ID NO: 302099 - DNA, 246 bp, Glycine max
tataacactgcagaataaccatataatggaagagttagacccaatttatacaaggtatatactcaaaagttagtcgtatttaccgactaacagtatgtttaatagaagatgaatgctagttactcaatgagtgggacacaataagcttgaatacaatgaaactcgctgacttagcaaagctaagattcattcaatttgctcaagtttccttcgtctagtggactgacagcggtgcaacacttattc

SEQ ID NO: 302100 - DNA, 453 bp, Glycine max
  unsure (1)..(453): unsure at all n locations
ngcctgtacaaatgcccgcatgacnncanttnagcaagnacgggcgagcgataagtcgagctgacgcatgcagccacacctttgtttntaatattaacccctaacgcgggagggcatcaaatcacacagccagaccaccggatctgacatggagtacacaaaggccccgagtaatgaaccgacccacgagcacacagcaatactctgccagaacctacccagcgagacgcctggcagagagtggacattcctagcaatacatgcaccagaattggaacagcgccatagtgctagacatccactgactatacaaagccgcccacgtgacacttgaaattcgcatacaggtgcaagcaaaaccccaggcacgaaacacccacgttgatcagaatacaacaccgcaagaggtgcgatgctgcgtgtgcgagacccacccagagcgggaggacgagg

SEQ ID NO: 302101 - DNA, 336 bp, Glycine max
agcttttttttagtcatgtttgaaaaccatgcaggggttatgtttgaatttagcttcagctaagacctcattagctatcattacaccatggaggatatgtctgcctttgaggaaagcaatttgcctttcatcaattaagcgaggcagcacaagagccagcctattagccaggactttggacattattttgtagacacaccctatgagagagatgggtctataatcattaagagattgggggctattggttctggggatgagggctatgaacgatgcattacttcctttggggaatctgccattaatgaagaattcatcaaagaatatgataaaagc

SEQ ID NO: 302102 - DNA, 236 bp, Glycine max
tcataaagcccccactgctcatcttttttttgtcttgtactacagataacaaggtctgctgcatccacagaaagttcttctgcctcaatccttctcgtcatcttataagttgaattgatatcctctattgattggcgtccctgcttgacaaagtgttcaagcttgtttcttccaagtgaatgacctgtaagcaccattggtacatttaaagcacctggaagaataacagcagtatc

SEQ ID NO: 302103 - DNA, 412 bp, Glycine max
tttgcaatcttatgttgcaaatatttacaatagacctcctcaacctcagcagcaaaatcaaccatagcagaacaattatgacctctccagcaacagatataaccctggatggaggaatcaccctaacctcagatggtccagccctcagcaagagaccagagcctccattcagagcttaaccaatcagatgggacaattggctacccaattgaatcaacaacagtcccaaaattctgacaagctgccttctcaagctgtccaaaatcccaaaaatgtcagtgccatttcattgaggtcgggaaagcaatgtcaaggacctcaacccgtagcaccttcctcatctacaaatgaacctgccaaacttcactctattccagaagaaggtgatgacaaaaatttacctaacaatttc

SEQ ID NO: 302104 - DNA, 328 bp, Glycine max
gcttatccttatggcaactcccgccttatgacgactatctctctggtctgacgatgaggaaggagatacccatctctgtcccctgctccacctcatagatctgtccccacatgaactaccccaaccgaacatagtccgccatatcccgacctcacccacacccgtaaaagaatctgttcccttcgcggaagataagggaaagattgaggcgctcgaagagaggttaagagcagtcgagggccttggcaattacccattctcgtatttagcggatttatgtctcgtgcccaatatcgtcattcctcccaagttcaaagtaccagacatt

SEQ ID NO: 302105 - DNA, 406 bp, Glycine max
  unsure (1)..(406): unsure at all n locations
ttctntattctatcgtttaagccgttatctcgcctaataaatgataaaatgaatttcaatcgatcatttgcgttgtaatctcgtttaatcactgttaaaacaaaatctaaccgatcatttacattgtaacctcggttaaaccaaaaaaagcaaaataataataaaataatcaaaatatctttgaataaaataatcaaaaaaaatcaatctgacgtttttctttggaggtttccttgaatgaattgactaataaccaaagtgaaactaagactaaaatcaactcacaaatcaagctttgtccataaaaatcacttataacccgttttaaggtccaacgccttatacggtcctctttgcttttatcggttaacatggacagttcataagcataaaatcagcatgtaac

SEQ ID NO: 302106 - DNA, 365 bp, Glycine max
tttcttcaatctgagagctcgggatatgtggatcattgtgaaacccctctccatacttcacaagggatgcatgtgcttgggaaggtagaaaatggaagttttgcattggaggaaaggatagatttggtggtctaccagcgataagaaactgcttgtgtgcttcttcactggaagtttgctctccattacggtccgtattagaagattcagtcttagatatttgaactggtggatgaatagtgtatccaggataactgcgagtttgaaacaagccttgtcaatagacactttatagactaattcagaatatcattatttaacaaacttgatatgagagtagatacaaaattggtacttgccaaatc

SEQ ID NO: 302107 - DNA, 438 bp, Glycine max
  unsure (1)..(438): unsure at all n locations
tagaaaactaagcttggcagatctatgccagaatgcaaggggacatatatttctcttactttgacatgnatnntaagctagatgacggcgattgtgaaacaccaaatattattacatatggggctttggtggatggtttatgcaaagcgaacagggttgaagaaacccatgaattattggataccatgtcagttaatggttgtgagcccaaccaaatagtgtatgatgctcttatagatgggtnttgcaagactggaaagcttgataatgcacaagaggtgtttgtgaagatgtcatagcgtggatactgtcccaatntgtatacctacagctctctaataaatagtctatataaagaacaaaattggatcttgtttgaaagtgttgccaagatgctcgagattcttgcactccaatgtggtattacacaacatgatt

SEQ ID NO: 302108 - DNA, 448 bp, Glycine max
  unsure (1)..(448): unsure at all n locations
agcctttgggtgttcctcttttccttttctcangccctatcattctcacatactggatnttaagtcttattagtgtctttttctaggatactctacaaaccataaaggctataagtgcctgtctcctactggcaaaatattcatctccaaggatgtggtgttcaatgaaaccaggtttccatatactgatctgtnntctaaatccatatcctcctctaccccaacatccttgtcctcctttttagcanacattccccttgttggtcctccacttgtcactcccttaccaaacactgtacccaactccccttcccctcctcctcanacttcccaaactcatgttcttgattctggttctgacattcagtcagttcccacttctcctattcctcnaaattccaaactcctgttctgattctggtcttacactcagtcagttccacttact

SEQ ID NO: 302109 - DNA, 379 bp, Glycine max
acgcagacaagtctcttagatgcctatgtgcccataatctatcttttgtcttctacaacaatgccttgagtagttcaagtttcactttaccgccagcaagtgaatttttatttcgatcaatgtgttcatcctaagcagccttaactgtacaattacctacaactattttggacatgggtatgaccatatataaatattgaaaccaaagattccttggagtaatgtgatgccaagaagaaatccaagattcctataagtataacccatgggttgaaaagaagcaagtgatgcttactattaacttcgtcttccagttcatgaggtccaaggccattcacattccctgctcataaggcgcatcgattatcatcatatcata

SEQ ID NO: 302110 - DNA, 276 bp, Glycine max
  unsure (1)..(276): unsure at all n locations
tgcctcanagaggtccaggaaggataaagcggccgaaggaaccagttccgctcccgagtatgacagccaccgctttaggagcgctgaacaccagcagcgcttcgaggccatcaaggggtggtcatttctccgggagcgacgcgtccagctcaaggacgatgagtatgccgatttccaggaggagatagttcgccggcggtgggcatcactggttacccccatggccaagttcgacccatacatagtcctcgtnttttatgccaatgctttgcctat

SEQ ID NO: 302111 - DNA, 426 bp, Glycine max
  unsure (1)..(426): unsure at all n locations
agctntgtggactagtgatattaatatatnttttagaagagagacaaagctaggaaggaaacaaaccaagagagtgaacataggtgcctgaaggaaaagttgatggtttgaactttgaactaactaataactaaatagtggatatgatatgtgataatgagagagacagtgagaaaaatgaaccatatccatatctctgatgctgtgtttgatggagcaaaggacatgactgacatatgctggtcatggcctcacgggtcaggctagcatgcattacatcatgcacgtgcgtgttttagcattctaccattaacggccaacggacgttcgcaacgacgtcgttcttgcaagagaaggtatttaactacttattgtacgtaggtaaaaatatctcaactcttaatgccagagtaaaccctattagtc

SEQ ID NO: 302112 - DNA, 233 bp, Glycine max
  unsure (1)..(233): unsure at all n locations
ctaataagtaggaatgtaagcttcatggagaatgagaagtggagatggaacgatgcanaaaatcagtaaatggattatttgaatcaagaagagttagttgatcatcctcctggtcgcgacactagattacttgccgacatatattagaggtgcagtgttgttgtgcttgaaccaacaggatatcatgaagcagaaaaagatcctaaatggagggttactatgcagaaagagct

SEQ ID NO: 302113 - DNA, 360 bp, Glycine max
agcttgcctctatatgtccaggattacaaggcagccgaaggaactagttccgctccggagtatgacactcaccgctttatgagcgctgtacaccagcagcgcttcgaggccatcaagggatggtcgtttctccgggagcgacgcgttcagctcatggacgacgagtatactgatcttcaggatgaaatatggcgccggcggtgggcatcactggttactcccatggccaagttttgatccagatatagtccttgagttttatgccaatgcttggccaacagaggagggcgtgcgtgacatgagatcctgggtaatgtgttagtggatcccgtttgatgccgacgctatcggccatctcct

SEQ ID NO: 302114 - DNA, 459 bp, Glycine max
tctagccacatggacttaccttgaattaattcctttgatagcccttttgagccttgtttccctttccttggtttgaagctcactacaagccttaagtgaaaaaccatgatattaccatatccttaaggaattttggagctttggaattgtcttgggaataagtgtggggggtttttgtttcattggacaactcgttctgttggctatgcttcatgatgtattttgggccatacttgatgtacattgtatattggttaaatgtggacatgctgaatgacatgctgtttctcaaatgctaaaggtaaaaaaaaaaaaattctgaaaagaaaaagaatagcaataatgttgagtgaataatatcttaaagggacaagattgatgaaactcttgttctactcttcatgtttaattttatcttacctcttttaatttctagttttttcttaaatgactattccc

SEQ ID NO: 302115 - DNA, 443 bp, Glycine max
  unsure (1)..(443): unsure at all n locations
ttagcggatttggtccgggattgctaaagatcacagcgggtctgaaaagaggcatatctgtgcatcctgctttgatgaatgcagaaactgtggcaaatgaaaacggcgacaatgatggagaaacccacgctgtgactgacactcctatacagtcaagatgcacgccaaccaaacaacgtccttacagacccaataacaacccctcttcttaccctgtgagtggatgtatacacgaccgtgatgaagccaaaagaagattgaaacgaggctcatttaacatcaatactaacacaatcatgagtcaaaaacacaaagccttgagcacgaggaatggaaaacaacccatgcgttcaatgagaaagatcaagtaattcaggggatatgcatcaataccactacaaagctcaactacgctggtgatatatgataactcgtaaccaccn

SEQ ID NO: 302116 - DNA, 377 bp, Glycine max
  unsure (1)..(377): unsure at all n locations
cgactaatacacttgtaaaaacatagaaagttagtntatttatatgtatataccatcaattgatatattggtatatgttactcatcaacaacaacaacaacaacaacaacgccttatcccactatgtggggtcggttacatggatcaacttccgccataatgttctatcaagtaccatacttctatccaaaccattaatttcgagatcctttctgataacccctcttatattacttttgggtctatctctgcctcgaatagtctgacttctatccatctgggctactctcctcactacagattctaccggtcttctctctacatgccctaaccacctaagtctaatttccaccatcttctctacaataggcgctact

SEQ ID NO: 302117 - DNA, 381 bp, Glycine max
ttagtcttaaacctttctcggatggatctcacgcaacgatctatcgattcgttgattcaaagtcaatctcataccataggtggtccgaaatcaaatcgtggcactccatgttcgtctaacggcgtttcggttacttcgattgcgacagtttctgcagttcgagacatttctttgggttttccgcattttgatggcgatacaccactcttggagtggatcttcaaagaagagaagttcttcaattatcatatcactccagatctcgatcgaagtgataattgctctattcattttcaaaagatgtgattccctggtttaacatgttgcagcggatgcaagttggagcacctgtgctgagttacacgtgctctggaaacacat

SEQ ID NO: 302118 - DNA, 251 bp, Glycine max
cgcctcatagaggtccaggaaggataaagcggccgaatgaaccatttccgctcccgagtatgacagccaccgctttatgagcgctgaacaccagcagcgcttcgaggccatcaatgggtggtcattgttccgggagcgacgcgtccatctcattgacgatgagtatgcctgattccaagaggagatagttcgccggcggtgggcattactggttaccaccatggccaagttcgacccatacataatcctcg

SEQ ID NO: 302119 - DNA, 365 bp, Glycine max
  unsure (1)..(365): unsure at all n locations
tagctntaatatatctatggtaaggcgtgttgtntgttacatttcatcagcagcaatgtactttgtgtcttgacacaatccacacacacaccagcattttccaacatccaaaaacaaagtcctaggataagttaagaactccaatctctcgcactatcttgttttcacattattattattactacttgtttgtgtgtgtctgttctacattgttgcttgctaccctacccatgatcttggaactgtgacgagatgccacattgattaacaacaacaacaataaccacgttagatctcaagttggagtctttgtctggagacacccattatggggggtgtgagtctgaaggaatcatggtgtttct

SEQ ID NO: 302120 - DNA, 533 bp, Glycine max
  unsure (1)..(533): unsure at all n locations
cgagtganattgattcgtcgcattcgacacctgaacactcagcttgactctatacgtgcaagatggagtgaggcggtcgaatgaaccaattacgctccttagtatgacagccaacgctttaagagcgctgaacaccagcagcacttccacgccatcaaggtgtggtcatttctccaggatctacgcgtacagctcaatgacgagtagtatgccgatttacaataggagataggacggcggctgcgggcatcacttgttacccgcatggtcatgtacgacccaacatatctcttgagatttattcccatgcttggtctatggaggagggcgtgcgagacatgatatactgcgtgaggggtccatggaatcgcgtctatgaagatgctatctcaccgataataggacattctttattgctggaacacggccgcgagtgctaatcttgctcataagaagaacaccgtcctgattgtctttactaagaagccatcctccacttgtagtgcatacctgagacagattcttccaccacn

SEQ ID NO: 302121 - DNA, 402 bp, Glycine max
tagcttgatgcactattgggaggagggcttttggttatttacttcatttctctattcctgaggctgattcaaacacttggttctctccaatttcagcatatgttgctaggcttattcttcagcagatgataatgaattgtgaatttctcatcatattggtatagctattagccactgacatcactttctgtgcatgagctatattgtgcaaccatgataggtaggcctaaattagatagcgttagaacttccactgctatgtgtacttagctcttcttggctaatgcacatttttatacattaagatcacataattacatccatacatgtatatagagaagatgatctagttactgtctaaagtctcattactcttgctaagattattctcttttttacaat

SEQ ID NO: 302122 - DNA, 434 bp, Glycine max
  unsure (1)..(434): unsure at all n locations
tctaaggattgcagcatcattggtacatttacttatagttacaaatattatnacccaaaaaaaagttgcattcttttgacaggacaaagtctacccaaaagattattaagatactaaaaggaagtacgtgaatcgttgtacaacatgtttcattataagagagtatacattactcacagtgtgtctttgtacttctgatagttaactgatagactaactactgtagttagtagttagtctgttatcacgtggtagtatagttagtgcttgccagctatgtaatagttgtcaactaacttaggttacattagttggtagttaatccaaatatataaacaatcttgaattctgattacagtggggttgaataatatcagatatctcaatctcaatgtcttctcttctctcaaaatctcttcaactctattattcat

SEQ ID NO: 302123 - DNA, 196 bp, Glycine max
  unsure (1)..(196): unsure at all n locations
tatctctntagctattcatatggtcataacgattcactcggatgtctgattcaagcgcataatatatcgagacgctcgatattgaacaatggaagctcttgagcaaatccaatggtcataacttttaactcggaggtacgattcatgcgcataatatatcgagacgttcgaaattgacaatggaactcttgaacaa

SEQ ID NO: 302124 - DNA, 355 bp, Glycine max
  unsure (1)..(355): unsure at all n locations
tctgttatgaatttcgagtgtctcgatatactacgggacacaatctgacatccgagtaaaaagttattgacatttgaatntgctcatagcattcgttgtcaattacgagcgtctagatatattaaaggattcattcggacatccgagtaaaaagttattatctttttattttgctcagagcttctggtttcaatttcgagcatctcgatatattacaggactcaatcggatatccgagtcaaaagttattgtcgtttggaattgctacgagcttccgggttcaattacgagcgtctcaatatgctacgggacacaatccgacatccgagtaaaaagtattgtcgtgtgaattact

SEQ ID NO: 302125 - DNA, 215 bp, Glycine max
tgcattctactacggattttcacttaccgttgggatgacaaaagcgccatcggaatcaaaaaacgcaaaaatgatgaccctatggctgcagactcgtcaatcccgtgggtatggatattgaaaggagggataagaattttttgaatgcaaacacgtacaccctttcgtgatacttataatttggtgcatgggtggctcgaccagacgagctaacc

SEQ ID NO: 302126 - DNA, 381 bp, Glycine max
ctataaatactcaagctggttcaggtacttacccgatgaagatcgaagaactattatagatctattgataaacgtcgaataacgggggaaatctttgcgaaattcctcacggataacgttaccgaaacgtttcggaagcgcctcggcttagattttcttcacggaaacaatttttcctagcaaattctaaagagagagaagtgcctatggggctgaaccccttccttcttgcattcctccactatttatagcataatatgggaggaggttgtccgccagctcgcccatgctagcagggttgcttcctccataagcacccgccttttgaggaattatttggatggcccaagtgggcctgggtgctatttgcactccactttt

SEQ ID NO: 302127 - DNA, 374 bp, Glycine max
tgcatctttttatacctcgatcggtcgtctttactggccgacgccgactgtcatttatttcgatcaatatcggtgaataatatttcttttgccgaagagggctaatgttttcctggccgaataaatcggaacatgccaatttcgggcgaaacgaaacatcggatgagctcgcacggataaacctagccgacctacattgtgagttttttatgctacaccgaagcaagaaaacttcccctgccgtaagataaaacattatagtgcagcgagcgttttttttaaggaaaaatcgctcaatgtccgctgagaaatatcagctggggccatttcacagcctatgtccgctattgagttttctattcaatccctgaatg

SEQ ID NO: 302128 - DNA, 156 bp, Glycine max
ggagtatgacagtcaccgctgtaggagcgctgtacaccatcagcgcttcgaggccatcatcggatggtcgtttctccgggagcgacgcgtccagctcacggacgacgagtatactgatctacaggaggaaatagggcgccggcagagggcaccact

SEQ ID NO: 302129 - DNA, 399 bp, Glycine max
  unsure (1)..(399): unsure at all n locations
agcttgtctttgtgttagatctgatttatacatganttangacttgtatgatccaatctacgcaaaattggatgacggtaagagggatttcgaaatctgcccaacttatgcagcaaagagctgtctaaatttgtgcagcagataattgtgcttgtgcagaaaatgttgtgtattctttattatggacattttctaggcgatcccaacggtcaaaatgtatacctatgtactagggacctccagtaaaagtttcgggtcgatccaacggttaacgaagcggaacaaagaaaatgttactgtgtatttgagtagagaaagtcgtggtattggaatgtgttttggcagagctctttgcctctgccctgttttcttgattctggatagttcatgatggttgga

SEQ ID NO: 302130 - DNA, 450 bp, Glycine max
  unsure (1)..(450): unsure at all n locations
ctaacttgagtcatcaaatgattataaatatgtgaccatggcacttatttcaagagactgatttccttttatgcataacaaatttctttcattcaattctcttcatctttctaaaagtttttgttcaatactttctctttcaagaaaagttccttgaccaaaaacttgtgctattctttttctttattccttctctcttgtcaaaagattgaaaggactaaccgcctgagaattcttttgtttcttcctttctccctcttaacaaaagatttcaaatgactaaccacttgaaatatcttttgtttcttacaaaagatttcaaaggaataaccatctgagaatatctttttccttttcccttaaacaaaagatttcaaaggactaaccgcttgagatatctnttgtttccccatacaaagattcaagggactaaccgcctaagaattcttt

SEQ ID NO: 302131 - DNA, 457 bp, Glycine max
  unsure (1)..(457): unsure at all n locations
agctntgtccatattaattacctaaaataccatttaaggtccaatgccttaanatggcctttttgcttttattggttaaacgtggacttttgaaagcctaaagccaacacataactntgtcactactttcaagaaaacaagagatcattaatagtccgatgccttaatgttntctctcctttcaaaaggatcaaaagatcgtttaaagggtccaacgccgtaaaacgaccctnttttgtattggtcactatatcttacaaaaaaggataaaaacaacttaaccaacgtttagttctcaaagaactacgtaggtctgtgatcgaggtcgtacccgaatcanataaacattaaaatgtagtaactatggaagtgatcctaggtcgtttcccaacgagaaatggataaccaaatgttcataacagatagtaggaagtagtaacaaaatgggggggggggg

SEQ ID NO: 302132 - DNA, 270 bp, Glycine max
  unsure (1)..(270): unsure at all n locations
cgcctcanagaggtccaggaaggacaaggcagccgaaggaactagttccgctctcggagtatgacagtcaccgctttaggagcgctgtacaccagcagcgcttcgaggccatcaagggatggtcgtttctccgggagcgacgcgtccagctcagggacgacgagtatactgatttccaggaggaaatagggcgccggcggtgggcaccactggttactcccatggccaagtttgatccataaatagtccttgagttttatgccaatgctt

SEQ ID NO: 302133 - DNA, 430 bp, Glycine max
  unsure (1)..(430): unsure at all n locations
agcttataggagtgtgtttttgacattgtatcagagtggtcatagaggcactgaaaagtttaaatcatagactttatgtagcgaaagagataaagacaagaaagggaagtaatattaagaagaataagattattaacagagcagaagagagtcaccatcaacgcatacatgagaacagattctagcttggatactgaggagagatactacagataatagagaagagactgtacaaccaaatatgatgagctaaatacaagagaaaggtgactctcctcaagcaggatttatcttactaatagttgngtcaattgtcaataccacgagtagaagccctaataacatcttaatgcttatgaaatggttccattgtggattggatatacaacaagaagttgaacaaaacacaacttcgatggatagcatgaaa

SEQ ID NO: 302134 - DNA, 273 bp, Glycine max
  unsure (1)..(273): unsure at all n locations
ctcagctcgagactgtcttatgatataatgtgtttatatatatatatatatattcatataattatctcttagttntaagagaaatacttaaaacattttttttcaattattcttaaacgcatcttataaatctatggagttgtctttacgcagatcctggatatcctgctaactatgacaatcctgagatgggatatggaggaactacatgtcctcctgattcttatagcatgcatcaggtatgtgacactctcttacaagttttatatgtat

SEQ ID NO: 302135 - DNA, 415 bp, Glycine max
  unsure (1)..(415): unsure at all n locations
agcttatcaaaatttgagaatggacttcanaagtctttcaaaagattacaaactacttcaaggaaaacatgaaggaaaaatagataattctttagaaatttccattcaatcatgtgatgactttgaaagtctaaaattaaagacaacaaagctttgtcttgaaaatgaggatatttgtaaataaagatatagtatattggaagaccttcagaagttgaaaaatcaactggaaggcttacaaaatgagtatatcacactcaataaacttcatgattgcctanatgaggaaagatgtnatctattgaaagcatgttcccaagtccataagaattatgaaaacttggaggcaagtaaacatatgatgtagctcccagtagagcttgtaggcctcggatcttntcatcaatggagtatt

SEQ ID NO: 302136 - DNA, 459 bp, Glycine max
gaaacctgaaccatcattagcaacatgaaacctgctgaggtaactagagccctgttaacccggtaacccaaccggccatgaataataatctgccctggtcgcagactctgtgggttatgcttcttttgcgacaacacacaaaacttttgccttctatgcaacaattttgaacaattgaacagcctgagcttatgctgcaaacatcaacaacagaacctctcaacctcagcagcaaaatcagccacaacaaaataattatgacctcttcaagcacaggtacaatcccgggtggaggaatcacccaacgtagatggcgatcttcaaacgcacacacacaacttatttcaaatgttgtacctaagcgaccatacttctcaccatcgacaacagccaaaacacaacagtgagctctcacaacttcctgagaactggagcaatgaatgcaacatgcgtttacaa

SEQ ID NO: 302137 - DNA, 431 bp, Glycine max
agcttcttcagtatcatgaatttcattttacattctaatatttctcatcaatatcaataaaaataccgttgtgcctaaggaacaataatatggtaaatctaaatttgttatagaggaaaattagacaagtaaagaatagtcaaacttgaattaaaatctaagagtggtaaatgagttgtcaaggtaaccttaattgtgtactaatttcagtgaacacagattaacactctttagtataagttgtcaaggtaaccttaattgtgtaaagtagcgaaatgaaattgtattacaagaataatattttaagatcaaggactagaagtgataacataatgatcaactattcatgatgggattagatataaacaaataactactcatgatggaacttagaactctatttttatttaattagcttgatttttatatat

SEQ ID NO: 302138 - DNA, 349 bp, Glycine max
  unsure (1)..(349): unsure at all n locations
tcttactacagaaatgtaatcgttatttctcttcatatacaaatatcttaggtgcacgttaaactctacgttcaatcaaaaggaaatngaagtatatcgtgcagtagctaattatatacctactaactcagcaaacatttctttttctttttgtttttaccttccaaaaattggttttggtgatttgtttttgatgtcaattcttataactctcacttgcaggatgagaaacctgaagatccagtgaccggccaataggaatcaacacaaatattaatgtgtgaatttcacatccagcaagttactagaatcctgaagagcgcctgctgtacgtatataatacgtatgc

SEQ ID NO: 302139 - DNA, 412 bp, Glycine max
agcttcagaattcattttcgcgcgtctcaatagattacgggactcaatcagacatccaatcaaaacattattgtcgtttgaattagctcagagcttcagaattcaatttcgatggtctcgatatattacgggtctcaatcagacatctgagtaaaaaagttattatcgtttgaatttgctgagagcttcaacattcaatttcgagcgtctcgatgtattacgggacttaatcagacatccgagtaaaaagttatcgtcgtttgaatttggtcagagcttcaacattcagtttagagcgtctcgatatattacgggactcaatcagacatccgagtaataagttattgtcgttagaaatcctcagagcttcggattcaatttcgagcgtcttgatatattacgggactcaatc

SEQ ID NO: 302140 - DNA, 357 bp, Glycine max
  unsure (1)..(357): unsure at all n locations
tagcatttnttgttcggtattggcctaaaaagttgcaatgtagttcggctatgtttcttcgtgtgagctcaaccgaagttgtatttcggccgacaccggcattttgtcggccaggataacattagcccacctcggcaaaaaaacatgattcaccgatattgacagaaaaaaatgctagccttagtcggccaggaaagatgaccgatcgaggtctaaaaaagaagcatgaccggattacgccgatcgaacatttcctattagatatgatgtgaacctgagtaggagcggatcanttgatacaggttacggaggttntggatgaacgccacttcagtgaaggaagataagtcatggtag

SEQ ID NO: 302141 - DNA, 594 bp, Glycine max
  unsure (1)..(594): unsure at all n locations
acacccacggcacgtaatccacgcaacgcacgaagacggcacaaaacacacanaaacagnaaggtaaattgagacctacgtagacacgctagacaatcccagacccggggatactctatagagacccgctgcatgcancgcangccatctacantacagacataccagcaaaaggacaacggcacagacggagcatatatcaacaccaaacaaacccacagcaggataaacgcccaaccccaccacaagtatgggcacaacgaaagagacaagcatgcggcaaaaatcaccctacgccatacctagaaacggatgctaactacgatgcagcaagaaagacacgagagacacgccgcaggcaccagccgaacaaatgtcgggacaaacactcacgaactaaggaagacacaacccaaccacccacatgaactctaaatactgaccaagcagagaatcaacatgaactcgccacataaagaaaattcgcactgagcgccagcgaacagagaccaagcctgctcaataagaatatgaaccaaaacacacggcagtacagacattgacgagcacacacacacaacggcggagaggacg

SEQ ID NO: 302142 - DNA, 140 bp, Glycine max
acatcgattttcgacaaggccttgagcggcttataaatatacggagatgtctttacacacatcctgtatatccagctaactatgacaatggtgatatgggatgacgacgatgtacacgtcctcctgattcttatagcatg

SEQ ID NO: 302143 - DNA, 430 bp, Glycine max
  unsure (1)..(430): unsure at all n locations
tagcttctcacatatagtttcaacccgaggtcctctaagagacttagtgtaaatattagccaattgatcattagaaccaacaaagtgagtcttgatttcaccagacaacaccttntctcttacaaagtgacagtctatctctatgtgtttagtccgctcattgaagactgaattagaagcaacgtcaagagcggcttggttatcacanataagcttagtgacttaagtgtctccaaactgtaattgtaggagaagttgcctaagccatgtaattttgaatgcagcaacttccatggcatggcatttagcttcgatgctgggtctagcaactatattttgcttcttacttctgcatgagaacaaatttcccttcaagagtcagaggtagacctcctatctgatggtgatcctacccaatcagcatcagagt

SEQ ID NO: 302144 - DNA, 285 bp, Glycine max
tggaccgaatgggaatattgattgattcatagctcatctattggctatactcagatctttggcctggattatggcgacacctattccctgtagccaagatcacttctgttctactatttcatgctatggctatcattaccattggccgcttcaccagttggatatcaaatatgtgttattgcatggtgagatgctactgtgcatcaaatgattgattgcacacattgccattctaccaatcacgcacattgagaacaagaatatggatatcaactgttggacaat

SEQ ID NO: 302145 - DNA, 423 bp, Glycine max
  unsure (1)..(423): unsure at all n locations
tcttcttcgtccgcttatccctcatgtaagactacacccgatttagacaaccccattaggtttagactaacttatactgagtttcgtccgcggatccctcatgtaagactagacttagttcaagcaacttacgaaagtttagcctaatatagcctaagcttcatccatagatccctcatgtaagactatgcttaaaccaaacaacatcattgtaaaaccataattaaaaccaaaacttaacccacagatccctcatgtaaggctaagtttcaatgttgcttcaatcacgttctaaggcaacagtacattttccaatgttaaagtcacctaactgtgcacacaaatgggtgatcagaccangagcatacaaacattaagcattgaatgaagcattgaacacaaaatacataatcaactagatat

SEQ ID NO: 302146 - DNA, 413 bp, Glycine max
  unsure (1)..(413): unsure at all n locations
cgaaacaagatgttgagagtgtntgacagaaatcacattctcattttgaagtcccctcttttcaaaaatagaacatttaaaattgagattgatgtgatagaacagaagtgttttaccactacagtaaacagtgaagagtggttatggcattacagatntggccatttanattttagagatctgattaagctaaactcaagagaaatggtgctgggnttgcctcagatcaagcctnctagtgaagtatgtgatggttatttacagagtaagcaatcaagaggcactttcaaacaaaatgtaccaatcagggcaaaagagaaacttganggtgattactctgatgggtgtggccctatgcanactgaatctctgggtggaaatagatactttcatatccttattgatgaattgac

SEQ ID NO: 302147 - DNA, 405 bp, Glycine max
gtgtatcgagtaacaatgacgaaacgactgtgggtactgtataatgcattggatgacactcattatacaatagggtatcaaagataattgggaccaggaaatataatacgttattttaacaagtaacagtaactacttagattctattctttatgaaccaaagtcactgttatcctagtgctgtaaatatcagaaggatgcaccacaactgcactgaagtcacttggaagacattcgagttcattgggctaattactttctagagaaagatagaaataaaacttaagctctatttggcactttacaaatggatataccccagaatagacaccatgagttgttcaatttatcgggagaatgtgcaaaaaataaatacataatgtgaaaaaacgaaatgaaatatcg

SEQ ID NO: 302148 - DNA, 590 bp, Glycine max
  unsure (1)..(590): unsure at all n locations
cgcgtacttacacattanaatcacatacagcacgaactgatcacacgtaccaagtgttgaatatanacaaaaaaagagagnnaaaatttgaaatttgagagccctgcntatancngacactatataagactcaagctcaagaagcactgtacggactcaaacaagcgcacagagcttggattttaatgattggcacatctctgagtcacacgggagtcagataatgctcagatgaacatcgcatatacccgaaggacacaacgtgtgaacctaaactgcttgtatggatatgacccaacaacaacaggcgttcgactcaaaggatatcgaatgtataaatgcacagaagacgctagaatatgacatgacataacttagtaggccagcctactcccttggatggaacatacaacaacattcaagggaatgatgcctcgaccactaatgcaagaaactgatatattgagaagatgcatatcgacaaaagcactctcaaatacccccacacagggaactaaaattggaacactgcaaacaagaagaccgatgccccaaggagaccaacaatggaccttgacccctaggaatgc

SEQ ID NO: 302149 - DNA, 351 bp, Glycine max
  unsure (1)..(351): unsure at all n locations
tatgctngcttgtgtggcttctatagaggctggatatntgagcttcaatgaggtcctttaattgtgagtttccaccatggagatgcagcggaagacaaacgataagatgtgagatgaggcgccatccactatggaataagccatggcagatggagcttcaccaccaagatgagccttggataagaagcttggagtggatgcttcaatggaggaaaagaaagacggagagaaagagagaggggggagcacaaaattgaaagaggataaagggagagaagttgaaattgagttgtgctcacaagactctcattcattaaaggtacatcaagtgttacacatgcttctattata

SEQ ID NO: 302150 - DNA, 470 bp, Glycine max
tgccaaaattcaagtagaagagagatatgttgctcattctattactttgtaattgatctcaaaacattataatcaattacactacatatgttgaactcattgctctcaagaaacttacagatgaatcaattcgtttaacaccttagaatcatattaataatgcataaaagaagacttaacctagaacaatcatcatgttagtctataacaatcaatacaaataccacatctattaaacttgtttgacattgtaaaattattaaaccaaaactaagaccttaagacatatcttcatagttttatgctttggtccaacaataattcttcattcgaaaatatgttactactgtttatattataaatgttaagccaaaatcattaataagaccatctaaactcattatcctttttcccatacttataatatttgtgcctccaacctacttctattaaatggtagacttataata

SEQ ID NO: 302151 - DNA, 227 bp, Glycine max
ctatcgagcgtctagctatattacgagactcaatcttacatcatagatcaacgttatggtcgtttgaatatgctcagagcttcaacattcaatatcgagcatctcgacatgtatacgggactcaatcagacatccgacataagagttattgtcgtttgaattagctcagaagttcaacattcaatttcaagcagctcgatatgttacgggactcactcatacattcg

SEQ ID NO: 302152 - DNA, 402 bp, Glycine max
agcttcttttggtccttgaacaagcaatcaactcctctttcagaaccatgctatgtgctcgcgactggtccctttcttcccttcgcaacttgagttcattattgctaccccatagagctccgcgaaatttgttccggacatactcttccttgtgagccctcttggtctcttgttcaagggctcttgcggtaattgcattctcttcccgtaacccggcacactccttccgaacgtgtgtagcaaccaacttgaacttctccttggcgaagtttgcctttcctaactcgcttttgagagcttggacttcttcgtcctcttccggtgcttcaaaattctcttcgctgacgactcttaacttggcgagccaatctaaacctcgtatgcgaactttcagccattcgt

SEQ ID NO: 302153 - DNA, 452 bp, Glycine max
  unsure (1)..(452): unsure at all n locations
ctgagggtgcgtagcccaccatctnttcatagtagagtatcgataatgtgtctaccatcacgattatcgtctccctttccatcattgggggtaccacttgggccgccagatccctccaccttttaggcgtgttctttgaaagatccgtccccctttntgcaaatgttctatagttgcatcctatccggaaccatatcaaaattgtactgatactgcctaacaaaggcaaccattatgtccttccaagaatggactcgggaagattccaagttagtgtaccaggtaacagctaccccagtaagactttcttggaaggaatgtattagcaattcctcatcttttgcgtattcccccatcttctgacaatacatctttagatggttcttgggacaagtagttcccttgtacttgtcaaggtccagcaccttgaacttgggaggggtgatgatatt

SEQ ID NO: 302154 - DNA, 321 bp, Glycine max
  unsure (1)..(321): unsure at all n locations
agctntcagccatttcaaacgatcataactttntactcggatatctgattgagtcccgttatataacgagacgctcgaaattgaatattgaagctctgaactagttcaaacgacaataactttntactcggatgtctgattgagtcccgtaatatatcaagacgctcgaaattgaatgttgaccctctgagcatattcaaacgacaataacttttttctcggatgtttgattgtgtcccgtaatatatcgagacgctcgaaattgaatgttgaagctctgagccaattcaaacgacaataactttttactcggatgtctga

SEQ ID NO: 302155 - DNA, 390 bp, Glycine max
  unsure (1)..(390): unsure at all n locations
actcagcttaacattcaatttcgagcgtctcgatatattacgagactcaatcttacatctgagaanaacgttattgtcgtttgaatttgctcagagcttcaacattcaatttcgagcatctcgatatgttacgggactcaatcagacatccgagaaaaaagttattgtcgtttgaattagctcagaagttcaacattcaatttcgagcgtctcgatatgttacgggactcaatcatacattcgagaaaaaagttattgtcgtttgaatttgctcagaggttcaacattcaatttcgagcgtctcgatatgttacggggcttaatcagacatccgagtaaaaagttattgtcgtttgaattggctcaaagattcaacattcaatatcgagc

SEQ ID NO: 302156 - DNA, 151 bp, Glycine max
  unsure (1)..(151): unsure at all n locations
agcctatggtgtgttcgatgcgggtttatctggggcggnagacgatcttgaccaacaccttcttcatcgtcatcgctatcactatcattatgatctgaatactgaatgtacggtctaacaagggatgggctctaaaacatggagtcacatg

SEQ ID NO: 302157 - DNA, 462 bp, Glycine max
acctacactttagtaaaatcatccattaaattgcgacccactctctttctttctatacgtgggtgcatagcaggatcccagaggactatcgtatgatcttatatacacctacttaactcatggatacaataaatattccctttacaaccatgtaatgattggtatagtacggatttacatctattaagggaatgagcctatatttaactatatgaccaaacatctcatgtgtctactatgaattccagtccaccaaaataaaatgatctcgcggcagcgttttaatcgcttactgactgcacggaagcccagacctgtgttcacgccattgagttccaacagtatatcatacttggtttctttcaagaatgttatgttagccatcttgtaaggacactcattagtttagactatagtggggttcgacatctattttacccataagtatctcactccacctcc

SEQ ID NO: 302158 - DNA, 344 bp, Glycine max
  unsure (1)..(344): unsure at all n locations
agcttganatgatgtaatgtggaatggtgagacttccttcttttattgttgaccacagagtggtacctggagatatgtcgcggnggtcaagagaccttgtggacatcatgtgggctgctattgcccaaaaccaagcttgaccaatcccgacccaacccgggcatagtcagtcagtgagaacctgtgatgtacctaagcaggcgagctcctggcagtcaacagataataggaacaaagaccacaaagcaaggaggcttgtgtggtggctggctggctgtgaatcttgtgtgatatatgggttatggcctctggtaatcgattactaagggtgggtaatcgattac

SEQ ID NO: 302159 - DNA, 476 bp, Glycine max
  unsure (1)..(476): unsure at all n locations
cttgaggaagcctcttaatgaagctacatggagcctggctcgtattaacgattcccaacccttcgtaaccattggatcttttcgaaatttggtctgccgtttcaaaagacaagtttccacgatctgaccaatgggatctttgagaagatgtctggagtgtgcgcgacatttcctgttccgagagcattgctcactttgtttgtttgagccttgtaatccaagtagcttatgaaaaatgccattccttctcctttctttcttccaaaaccatttccaatggttcaagctctttcttcatcacccacagccaccattagccaccacaaaccgccgttgttctccgttgaaaccccacacccgagaggtacacctttacccgaagcggaatcttccaacttggcttgtagtttcggtagccaacgaaaacctaatccgaccttttcattttcttcaaggtaccacggtctatgtgatcn

SEQ ID NO: 302160 - DNA, 438 bp, Glycine max
  unsure (1)..(438): unsure at all n locations
agcttgttaaattgtggttntcttgatgaagattntatgtgcttcagttgttnttttttatgtggttttgaagtttaactaaagtagttgtgtgctttgtgaaatgggttcagggtcttttggggctaataatgtttgtggagagagaagatgatcgttgtgctgagcatgattattgatgggtagcagaagtagaacggtaaacgttaacactaatgacactaacaaggttctgaacgggatgccaagctacgctcctccattgccttcttctaattccatgtgaatctttctgaggacccttatgtcgttaatgttgatttcgttctatattgagctatgataggttcctggatcgtagtttgcttcgtttatgattctcatgtgggagattatttatatggtgcaatatttgtattctagttaactttatgaact

SEQ ID NO: 302161 - DNA, 191 bp, Glycine max
tatctctatgtgctttgttggatcatgttgaaaaggattgagtgcaatgctgatggcggacttattaacacaaaccagtccaataagagcattatattttattttgaggtcatcaagtttgatcttcatgcataacaactcactaaactcctgagccatatctctaaattctgctactgcacttgatcttg

SEQ ID NO: 302162 - DNA, 418 bp, Glycine max
agcttctgttttctttttcgagcatcttgatatatgacgggacacaatcggacatccgagcaaaaagttattgtcatttgaattttgtgagagcttctgtattcattttttagcatcaagaattattaaatgactcaatcagacatccgagtaaatagttattgtcgtttgaatttgctgacagcttctgtattcaatttcgagagtctcgaattattaaatgactcaatcggacatccgagtcataagttatcgtcgtttgaatctgctcagagcttttattttcaatttcgagcgtctcgatatattatgggactgaatcggacatccgagtaaaaagttatggtcttttgaatttgcttagagtcactggtctcaatttggtgcgtctcattatactatacgactcaatcggact

SEQ ID NO: 302163 - DNA, 410 bp, Glycine max
  unsure (1)..(410): unsure at all n locations
ataagcaaattcaaatgacaataactnttgactcggatgtccgattgagtcatttaataattcttgacgctagaaattgaatacagaagctctcaccaaatttaaatgacaataactntttactcagaagtctgattgtgtcccgtaatatatctagatgctcaaaattgaaaacagaagctctgagcaaattcaaacgacaatagcttttgactcggatatccgattgagtcatttaataattcgagacgctcaaaattgaatacagaagctctaagcaaattcaaatgacaataactnttgactcgaatgtccgattgagtcattntataattcgagacgctcaaaatngaatgcacgagctctcaccanatntaaatgacaataactttttactcagaagtctaatt

SEQ ID NO: 302164 - DNA, 509 bp, Glycine max
  unsure (1)..(509): unsure at all n locations
agagggaaatttgattcgtggcactgcgacacctgaactctcagcactacgctcncttggagcgtcttgcttacctcgacacgctatacttcactctctacaaaaacggtgcagtcgcccgtggttattcggatctccatcgatgcgtatcgaggctctagatgcgcatctggagccaaacacacgaaccaaatcaaatctgatgtcatgcgagttttctcgaaacaacggcatgtgagagaaagccttacgcctatgttgtgtactgaagcaatggggcgtgacacattgatccgattctcgagcaagctgtgtacaaacgcgcgcaccccaatcgtctgagatgtgaccgagcgtatacgacatgattttgcaaattgtgaggtgggactgttcataaatgtaaatacagctacgagagtctaatattgcccgaatgcatctcaactcagaatacaactttgtgcttgatggcaaagacctcccctgctatgatacacataatgtcn

SEQ ID NO: 302165 - DNA, 437 bp, Glycine max
  unsure (1)..(437): unsure at all n locations
agctttcttgagataacttcattgaanagcttctntgagaaaacttccttgagaagctagagcttagctacacatacccctctcataactaagctcacctccttgagaagcttccttaagaagattcctaaagaagctagagcttagctacacacacctctataatagctaagctcacctccttgagatgagaagcaagagcttagctacacacctcctataatagctaagctcaccctcatgacaaaatacaaaaaagtccctactacaaagactattcaaaatgcctcgaaatacaaggttataactctatactactagaatggccaaaatacaaggcccanatgaacganaaacctattctaatatttacanagataagcgggctcatacttagcccatggggctcgaatctaccctaggctcatgagaaccct

SEQ ID NO: 302166 - DNA, 403 bp, Glycine max
  unsure (1)..(403): unsure at all n locations
tgccaacccatggaagctcctaatatctcccacactntttgtggtgggccattcttggatgaccttgattntctcagggtccacttggaccccatttctaccaactacaaaccctaaggaaactatattatctacacaaaaagtacacttctctatatttgcatagagggtgtttttcctacggactgaaagaacttgcctgagatgtcctaagtgatcatctangctcctactgtacactaaaatatcatcaaagtaaacaactacaaatctacctatgaaatcccttaagacatgatgcataagcctcaaaaaggtgcttggtgcattagtgagtccaaaaggcatcactaaccattcatacaaaccaaactcggtcttgaaacgngttttcactcatcac

SEQ ID NO: 302167 - DNA, 399 bp, Glycine max
ttatcttgcagagttatgtctcgtatcaatttaatgaattacaaccttctcataatcgattacacatttgtttctgagactgactgatttattcaagagtctttgtgtttaatcgattaccatgtgatataattgattacttctcctactataagtgttttagaagtgaacatgaacactttaatcgattactttgagtatttaatcgattacattgttcttgagttgtttctaggtgtttggaagaacactctaatcgattaaaaagataatctaatgaattacttcattgaattaatcgattgccttgtagatgtaattgattacaggccgttatatgtgctttctctataaataaacagcttgtgttctctactaaacaatctcgatattacacaa

SEQ ID NO: 302168 - DNA, 300 bp, Glycine max
  unsure (1)..(300): unsure at all n locations
tctagccanatggacttaccttgaattaattcctttgataccttttgacccttgttcctttcttgtttgagctcactcagccttaagtgaaaaacatgatttaccatatccttaggaatttggagctttggattgttttgngataagtgtggggggttttgttcattgacaacttgtttgtgctatgcttatgatgtattttggccatcttgatgtacattgatattggtaaatgtggaatgctgatganatgtgttctcaaagcaagagtaaaaaacataaaaaaaaatctccaaaaat

SEQ ID NO: 302169 - DNA, 465 bp, Glycine max
cgtaggattatggtgtacccatcacatgtggtactaggtggcggttggcaatgtgcacacaagtttttcccttccacatgcgcgcataacccaaccttccctggttgcctaccttcactggactcaccgtcttccacggtacccatattcctcgttctctaaccaccgggtcccattaattcttccaagcttacacaacattccagcaaaacaacattcacacagcacaagctatcacagcccaaccaaaacagagccaaagcagaaaactctgccaaaacaccaaccaaaaatcacaagcttttccactcaaaaaacccaggtaccaattcttcgatccaattcgataaccgttggatcgactccaaaatttacttgaagtctacagtgcataagcctacattttgaccgtggggatctactatcatacattcagaactcattctacattactcttgtcacacg

SEQ ID NO: 302170 - DNA, 289 bp, Glycine max
ccctaaaaccgaccaggactatgagcctggaacagcgacactggccggatctcaaggacgagagcagcgagcttggacactatctcccaagagcccccacaacagaacaaaacgacagcggggccaaggatacacctacataatgcgaggctcctgacgctacctcggaacagcgagccaccgctaggaagcccacacaaccgtcggctccatcctgagcaccgtcttacagcaacaaaacccccaatactcccaattggaaaatggatgaccagagacttgcaccacc

SEQ ID NO: 302171 - DNA, 355 bp, Glycine max
agcatttgatttgtccaacttatatccacccctaatgttattgatacaaaataaagaatttttatcaaaaaaaaaacatattcattacatcaaaatgtaaaaggcatttattttctttttcatccattaaaacctttctaattttgtaattttaacaaaaaaagaatattaaagagaaaaacctatgatgtatttttttatgagactattatgtattcttatatctgtgttctagtaatacaaaattaattgtggagtgacatggacccaaaagttatatactaatataattcgatttttttctaatatacttttagagataatctcataatattgtcatttcaaaaatgtgatc

SEQ ID NO: 302172 - DNA, 435 bp, Glycine max
  unsure (1)..(435): unsure at all n locations
cttaaggaatgaagtcttaattggtcatctctcaagatgttgtaaaacttaatggngagattgatactttaaagacaaccttagccaaacataaattaagaatttataaactctgaccatcataattgttctaagctcaattgatatctttgatatgctatgtatgctccttgaatcaaaatttatataatttgtcttcatcaaaatggggcagattgttagaattggacaacccatcattgaacgatccattcattccttttaagtttgatgagtaacaaagatataaatntatgaccactaataacttacacttaaaagtgcaagacatgtcatatggaagtattatggtaataacttctatctcttcagctcctttcttgattgtcgccactcttcaatcctgtgcctatttttaaaagaataatcacatat

SEQ ID NO: 302173 - DNA, 100 bp, Glycine max
  unsure (1)..(100): unsure at all n locations
gtaagtgaccacatacaggattaaaaaaatactctcacccctgccactcatgcantactgttggattcatatacctatgggacatgtgaatcttacaacg

SEQ ID NO: 302174 - DNA, 384 bp, Glycine max
agcttccttagtttgagagaagcttatgtcatggctgccgtgcaaactcagttgactaaggtcccacttgacgagatcatgatcagagaatttgctgagcggcacttcacccataacttcgcttctcataatgctggcacaattcttatcctctacaagtatgagaagattcatctttctgctttggagacatatgcacattcgattcactgtgctattgatagcaaaaccactgccaaacactgtcaggaatcattcatctacagtcttcactccattgtggcaagaagagctcattcggataatctaactatgtatcaatgttaatatgaactgcacctcgctcctcattggagagctcaacttcatactattctccaccga

SEQ ID NO: 302175 - DNA, 62 bp, Glycine max
caagttgtgagctgtgtctgatctaccatggctgcaaacgtgtattattatttgggactgtc

SEQ ID NO: 302176 - DNA, 407 bp, Glycine max
  unsure (1)..(407): unsure at all n locations
agcttgtagcatattcgaacgacaataactatttactctgatgtccgattgagtcccgtaatatatcgagacactcgtaattgaaaacagaagttctgagaaaattcaaacgacaataactttttattcggatgtccgattgagtatcgtaatatatcgagacgctcgtaattgaaaacaaaagcttgtagcaaattcgaacgacaataactttttactcggatgtccgattgagtcccgtaatatatcgagacgctagtaattgaaattagaagctctgagcanattcaaacgacaattacttgtgactcggatgtccgactgtgtcccgtagtatttcgagacgctcgatattgaacactgaagctctgagaaaaagcaaacgacaataacattttactctgatg

SEQ ID NO: 302177 - DNA, 471 bp, Glycine max
  unsure (1)..(471): unsure at all n locations
tnggagttgcgaaagccccacttcatcattaggaataataccttacatcttaaaccgaccaaatagacctaaccagaccattatagttgctggttgaataccttcaccacttcagtgtatcacacaattatggcttttctctaatgaaacactcttgccttttaacactctaattcccctttgagttctaagcaattcaagagattatggccacaacaaagaacaattcaccaatatgtgtaaggtaaggctagacaatgaaaaggttaaccaagattaaggctaacaatggttttatgcacanatgaaggaaataatattcagaatttangaattcangtaacaatccttcatgcaaccaatatattacctttaaagagttntttcttntaagttcttcangcatgaaccattcagcccacttttttttatttntaatatnnttatcacaaaatcgcttcctttctttcc

SEQ ID NO: 302178 - DNA, 413 bp, Glycine max
  unsure (1)..(413): unsure at all n locations
agctnttcctctgtttgttctgttaggatttctaagcgttagagagaagaagagattgtagcctccatttcactgtcaacgtgcaagactaatttctctctgcaaaaacattatgttgcaaatcccaacagtgagaatatgcaaaacaggttctaaaggtggttccaaattcacgatgatccaacggttgacgagtccatgatcataattttactgggacagatttgggtgtatgcgggaaaagagaaagttcagtgcgagggacatttcttccaccatagtcattatctcanacattccaatgataggtgtatgcaaagataagtttcaaactatgtgttcaaatttcacgatgatccaacggttaacaagttcnggatcattggtttacaaagacaagtttgaatgtatgc

SEQ ID NO: 302179 - DNA, 522 bp, Glycine max
  unsure (1)..(522): unsure at all n locations
tggggaccggaaaccgtagaccatgcgacactcacaatactaagcttcttaaagtcacttnctcatttactagtcttgacaagtggtcagtcactagattttcaaatcctttcttttcttgaatgactagatcaaattcttgcagcaatagaatccatctgattaacctggacttagaatcgactntggtcaacaaatatttaatagctgcatggtcggtgtacacaataaccttggatcccaccaaatatgatctgaatttttccagggcatatacaattgcaagcatctccttctctgtggtggcatagttcagctgagcatcatttaagaccttgcttgcatagtagataacatgaaaaaatttttctttctcttgcccaacacagcaccaacgacatagtcacttgcgtcgcacatgagcttaaacacttggctctaatccagtgctataatgactggaacgaacactaagctgggtcttaaggcattgaatgccttccaacactcttcatcanatan

SEQ ID NO: 302180 - DNA, 445 bp, Glycine max
  unsure (1)..(445): unsure at all n locations
agctntgagtntttgtacatgcagaagagtttatgaactcanggacaatactcaagccccactaaaacttgtgtcaatactcaatagcatgaacacattgagttcatcattagaatatattcaatggttgtaaactcttttataataacatttgtatacaaagagaagagattataacatttgttttatatgcaaactatgatttgcttacttctttttaggtccttacctcaattggtaacttttgcatttgctttatagctatagggatgatttttgacatattgaatatgtacataaaggaaaacaaatctattactaaggcttaccangaggtatgtgtgtatgcctatgttatgtgttatcatgctataattggccattatcctttntctttcctctatntcctctagtaataatatntctcttggtgctcatcttaatc

SEQ ID NO: 302181 - DNA, 330 bp, Glycine max
  unsure (1)..(330): unsure at all n locations
ntagtgactgtgtgtgacgacaaatcttatattgagtgtcctcatggatatgttctacaatcggttntgcatgaatttctaattatcataacatatgattcatggaagtgatctgggcattctttctttctttacattttttagccatgggccaaacagctatcccaatgtacattatttttgtcatttgcaagcccctttgagtcagacacttgatattttattgaatcacaaacctaagatgaaagtttcctaccttaccttaagataggagagcagggatgttntcgatggagatttctatcatttagtggctagttgttggtattg

SEQ ID NO: 302182 - DNA, 428 bp, Glycine max
  unsure (1)..(428): unsure at all n locations
tttcttcacagtttatctntttcaaacttgagttttggaagaccaactactaagtctttcctaactagatgatataaacgatggatgttaatgtgttcaaccctacaatgccacaaccatgaatcatcatctatcttactcaccaagcaacttagctcatgaaaagatgcatgctcaacattcagcatataaatattacctattctcttaccaatgtggacaactttaccagatatggcttcacttataagatagcaatttctgtcaaactcaatcttgaaacctttatcgcatagttgactaatggttagaaagttatgctctagtgcatccatatgtagcacattctttatctgagttttgtgttaattccctatatttccttccccagtatattttgctttgttattgtctccaaacatgacata

SEQ ID NO: 302183 - DNA, 397 bp, Glycine max
  unsure (1)..(397): unsure at all n locations
tcatgatgatgaatcaagttgattcaagtagttttgatgataacttagatgatgacaaanagcccaagagaatgatttcaagattgactcaacacgtttcaagaatcaagagaagtttgatttcaagattcaagagaagatgaattcatgattcaagagaagatatcaagaagacttcacaagggaagtattgaaaagatttttcagaaaacaaacatagcacagttttttttttcacaacagtttttctcaacattttctaagctaccagagtttttactctctggtaatcgattactagtttcctgtaatcgattaccagtggcaaagtttgatttcaaaagttttcaactgaatttggcatgttccaattaatttcanaatggtgtaatcgatt

SEQ ID NO: 302184 - DNA, 332 bp, Glycine max
  unsure (1)..(332): unsure at all n locations
acactctaatactaagcttggacgccatgctaaatctatcccatggtctttttattttgtaatagtgcatccgcttttaaattatgaatataattttttctaacttacccttattatattatgagtgtagaagataataaaatcatataatattttgaatatttaaggaagggaattcagcaaaggaacttgtttgcttataatcgaggtatctaatgacattcttatttttgtgcataaccttaaattatatatgaacggaatcaatcctgtgatcgacaaatctgtatatcgatactcatttgttgagcgctntgtccatgttacatgaa

SEQ ID NO: 302185 - DNA, 439 bp, Glycine max
  unsure (1)..(439): unsure at all n locations
ggcatgcttgctacngcacttgatactggctctatacgagcctataatagcacgtagtaatttgactacgctcgagtaatgtacatgttatgttatatgcagtcaaggatacatcatgtttcattcttgtttgcgacctgtgttctattatatgcagacctgcacttgtgtattgtgacactcacactaagtgtcccacaaaaaatgctaaaaaactagaaaagaatgggcgtgttagaactttgaacaccacaaagaagcatctagatgcattatcttggaaacacaatcaaggagcaaaaccccattctacgatctctctgaatttgaaccaatcgagacaaagtgagcactcaacgtacgaccgtagcaaaggacggagcatctaacggtatggtcatagatacatacaaactgtagaccatctgacatccaaccg

SEQ ID NO: 302186 - DNA, 457 bp, Glycine max
  unsure (1)..(457): unsure at all n locations
ccaacattcaacttcgagcgtctcngtatattatacgactcaattagacatccgagtantaaaggtattgtcgtttgatatntctcagaagcttcacattcaatttcgagcgtctcaatatatgacgggactcaatcagacattcgagtaaaaagatattgtcgtcttaattggctcaaagcttctacattcaatttcgaacgtctcgatatatgacgggactcaatcangcatccgtgtaaaaagttattgtcgtttgagttggctcagagcttcaacattcaatttcaagcgtctcgatatatgacgggactcaatcangcatccgagtaaaaagttattgtcgtttgaatggctgagagctcaacatcaatttcagcgtctcgatatatgacggactcatcagacatcnagtaaaagatatgtcgttgaattgctagagcttcacattcattcg

SEQ ID NO: 302187 - DNA, 433 bp, Glycine max
  unsure (1)..(433): unsure at all n locations
tagcttaccctatatgacactccttataccaccaagtttctagctcggtcacttttgaaatcccgctaactgagtacaaagtgacttgcagcagtttggtgagtaattaagcactcttctatatgtcaaattttaaaatcatttacatatcaaatatgaatttcatgatgtttcgagtaccatatacttatttatgaaagctacaagattcacccatttgaacttgaaagggactatgaagtgtaggatagattataatcatggtaggaagactgtaaaaantggaaatggatggaggaaatttgcacaatcatagaatttgcttactagaactcaaatcatattngaattcctagatgcaacttctaactttgtttaatttggatttgttggaattaaagtatattactactgcactattatcaagttataa

SEQ ID NO: 302188 - DNA, 53 bp, Glycine max
tgtttgaagcgatcccagtgggcttgaattagtgaagtgtcaatcgtcatgga

SEQ ID NO: 302189 - DNA, 392 bp, Glycine max
tagctcgtaggcttctatttacaaccatacattggctttgaacaccatgagaaaattcacacaaaaaactgaattagtgagacatggagttacaagatttgctaccactttcttaactttgcaaagattgcataagcaaaaggccaatcttagaaggatgtttacttcagatgaatggttgaagtctatggcagctaaagagcccaaggggaagcaagcaacagatgttgttcttatgccatcattttggaatgatgttgtctatgctttataggctatggggcctcttgaagtgtgtcgatgtggtgaataatgaaaaaaacctgaatatgttcatttatgaacaatggaatggccaagagcttcaatacaatgaaagatagatatggata

SEQ ID NO: 302190 - DNA, 412 bp, Glycine max
  unsure (1)..(412): unsure at all n locations
ntatacggataaccactctggtatctccgctcgtcagcttgacttataagtcagtatgacagatcttgtgagcgcggatgatgacgtaagtctccgcgtgtaaacaggcttgtcggccgcgattgacgaatggcgcaggagacgactttagtctctgcgtgctatcaggcttctcggctttcagatagcagaaaggtttatacggataaccacgcgggtatctccgcccgtcagcgtgactcattagtcagtatgacagatcttgtgagcgcgtaagatgacgtaaatcttccgcatgtcaacgcgctagttggccgcgtttgactaatggcgcatgagacgaccttagtgtctgcgtgctatcaggctattcgtcttaccgaagcaaaaaggtctattctggtaaccactc

SEQ ID NO: 302191 - DNA, 379 bp, Glycine max
  unsure (1)..(379): unsure at all n locations
agcttctaaggttgtagaataatcaattatcaactgtggtaattgattatcttgagcaacaaagccttcttctataaatggctntataatcgtttagtaaaactggtaaatgattaatttgacgactctagccaaatttcaaatagaagtgagttgtgttgcttgttcttacactttgtaattgattacataaccttgtaatcgatcacattgtgttgaacttatggcttctaagaaactttgatatcaatccatgcatctatcatgtttgattcacactaagcatggataaagaaaaactaagacttaatctaccacccatgcctagactaatacattcaatacaaatgccacatcttttaatatgtgtctaacattg

SEQ ID NO: 302192 - DNA, 400 bp, Glycine max
  unsure (1)..(400): unsure at all n locations
ntctccactaagtngcctgatgtctgatatgtcttttctgatggtagtggtcctagatgcanggaagaatatctccaagaacaccctcttaaggtcatcccaactaaaaatagacctgcgagcaaggtagtatagccaatcttttgtcactccctccagagaatgaggaacagcctttagaaagatatgatcttcttggccatcanggggcttcatggtggaacaaacaatatcgaactccttaagatgcttatgaagatcttcacctgcaagaccatgaaactngggcagcacatgtattagtccagtcttgagaacatatggaacaccctcatcatgatattgaaagcacaagctttcataagtganatcaagtgcagccatctccctagagtcctct

SEQ ID NO: 302193 - DNA, 386 bp, Glycine max
agcttatgcgcatatttccttacgaacgttcacttgcacaagacattctattaactaagaaaaatgcacccatatacaatcaaggcagcttcgttacctagattatttacatgtacttccaaggtgtatttgttacctacatcacacacatttcctttgctaaattcacatacatgcatactctaagcactttggctatcgaaaattgcatacgtgcacatcctggtatttctaatacctatacatacacaaactttatgataaatcttgactatctacacaataaggtgctacatttcatgcttttttcaagtttttgctacctaaagccgcatgcaaattcaagtatattttcttttgctgactaaaattgtattcaaaataaa

SEQ ID NO: 302194 - DNA, 408 bp, Glycine max
  unsure (1)..(408): unsure at all n locations
ctagcttctcaggaagtttcttaagaaagcctctcaaggaggtgatcttagctattagaagctaggggtgtgtgtagctaagctctagcttctcaaggaagtttctcaaggaagttacctaggctataaatagaagcatgtgtaacacttgttgtaactctgatgaatgagagtcttgtgagacacacttcanagttccacttctctccttctttnttctccttcaatgtcgtgcccctccctctctctctctctctctctctctcattcttttcatccattgaagcttcctttctaagcttcttatccaaggcttattccctagtggatgatgcctcctctcatctcttctcctatatcttccgctgcatatccatggttgaaaatcaccattgaagaacttcattg

SEQ ID NO: 302195 - DNA, 333 bp, Glycine max
  unsure (1)..(333): unsure at all n locations
agcttccttntagtgcgtcacgtttaataccgagctcgatggtggtgcgagcctttgatggtactcggcgggaagtgatggnggaaatcgacattcccattcagataggcccccacacttgcaatgtggtgtttcaagtaatggatataaatcctgcctatagctgcctcttgngaagaccttggattcatgccctgngagtggtcccttcaacgcttcaccagaaattgaagctcgcagtgggtggagttttagtgatagtgtcgggtgaagaggatatgttagtgagctgcccctcctctgccccatacgtagaagcggcggaagaatcat

SEQ ID NO: 302196 - DNA, 386 bp, Glycine max
  unsure (1)..(386): unsure at all n locations
tggttcgaggtacttacccgttgaagatcgaagaacgatgaagatcatcgaagaacggttgaaacctttgcgaaattcttcacggaaaacgttacggaaacgtttcggaagcgcctcggcttagattttcttcacggaaacgatttttccaagcaaattcgaaagagagaggagtgcaaaaggggctgaacccttttcttcttcccttcctcccctatttatagcaaaataggggaggtggttgccgcccagctcgcccaggcgagctcagctcgcccaggcgagccaggttgcttcctccagaagcaacagccttctggaggaatattctggagggcccaagtgggcctgtgtgctatttgcacccncatttttactaagtacac

SEQ ID NO: 302197 - DNA, 446 bp, Glycine max
  unsure (1)..(446): unsure at all n locations
agcttgcacaacatgtaaatagatctatttttttacaaaatgaactaactaactaacttctactaatatatagagtgactgatcagaatgaagggatgggccttgattagacctatctaatntacctaattaaactaattgcacataacaaagcccaaactcacatcacaattattcaagtgcataggttctgactttcaaactcaatntatagaaaaccgatgttaaactaacatattaacatcggttttactgganaaccgatgtcaacgttcatcatgcgtacactttntctgctgttgttcattgtgtttaacatcgggtatttagaaaaccgatgttgtcatatgtatgttaacatcgattcttcaaaaccgatgttacattcatacattgaacatcgtcactttcaacatctgatttagaaccgatgtagaatgttctaa

SEQ ID NO: 302198 - DNA, 468 bp, Glycine max
  unsure (1)..(468): unsure at all n locations
tatttcttcatgccactaatgaaagtacttatgtaatcacaagttatatgtttaatgacatttgacaattctataagaaaaaaggtctgttaagtgttaacattagaatattcatatcatggaagcaacttgcagttcaacatgaaatacttgattttctcatacttggatcattgagaaaaacggttgatagaacacaacagaatattaattgcaatatgctaattttggataccggaaatgtctaccaagcagtntaagaaataaggttgctaacaatatgttacacagaatattaattgcaatatgctaattttaacaaacagattatgtcatttagagaagaggaaaccttgtgtgtcatgagaggtngagactttnggaaaacaacaaagaatttatgaagggtaatgatccaaaagaggaataccaaatcatggacacatccaaagggcaatacattctcac

SEQ ID NO: 302199 - DNA, 396 bp, Glycine max
  unsure (1)..(396): unsure at all n locations
agctttgagccattatcctgactctccataaaccttgnacccaggtgagaatgccaatccttaccctcggaagcaaaaaaaggaaagaaagaaaggaaatttccaatcaaagagaaagcacaaaaggaaggaaaggaaattcccaatcaaagagatagcaaacaaggaaggaaaggacattcccaatcaaagagtgggagaaagagaacaaagacaagaaaggaaattcccaatcaaagagtgggagaaagaatatagacaagaaagaaaattcccaaccaaagaatgggagatagtaaaaaagatagatgctcctggtcaaagaaaccagaagacatgtgccgagaggtccttggaccacacgatatctgaacaatacagaattgtcaccaaatg

SEQ ID NO: 302200 - DNA, 294 bp, Glycine max
  unsure (1)..(294): unsure at all n locations
tacaattatatgatggagtgggacaagatcaatcgataggcataaccaacccaaatcataaattagtcataaccaaaatataatccaaacaatcataatntaaaaacacataanatccaatcataaaagactaaagtccaaataccaaaagataaataaagtgcagaaaatgataactnatataccatagccaaaatacacggcttnaaaagaaaattatanactaaactctaagactgtggacgtggtggtggaagatcgaagctctggcgaatataacccacatcttcttca

SEQ ID NO: 302201 - DNA, 322 bp, Glycine max
agctaacacactttgtggacgtattttctcatgtatagtgtaaaattagttgttcatgtttgagtgtccatttgcaagtttcaaaactacgtttctgatccaattcgatctggagtgttattttagtgttggtatattagaataaagtgttgtgtttgctctaataatattttagccattagtatccaattagatgcattagttgcttgaaatataatagaccggacataattcggctgttcaaaatatataattttggcaaaatacttttgccgcctaaatatcccccataatattgttatattacatttcgataatgatc

SEQ ID NO: 302202 - DNA, 270 bp, Glycine max
agcactatatgtattgatatgactctttacaatcgattatgaatgacaacgttcatatacactagaaatcgactaccaatatcttgtaatcgattacaccattctgaaatcaattggaacgttgctcatttagttgagaactttttgaaatcgaacttcgccactggtaatcgattacaggaaactggtgatcgattacctgagagttgaaaatctgggtacttagaaatgttgagaaaaactcttttgataaacaaaactgtgctatgt

SEQ ID NO: 302203 - DNA, 400 bp, Glycine max
ccttcactttcgatattgtttgattctcaactagtttatgacactgttagttcttctcaaatgcctcctttcttgtgtgtaacagataaatccaaagtttccttgtgaaatcatcaactattgacatgaagtatctaacttttccctttgattatacctttgaaggccctcacaagtcaaaatgaatgtcatccattctattcttgttggtgagcattccagtactgaatattactatgtgacacttaccatacacacagtgtcacaaaaaaggcttccaatttgtactctccaactgaccttgttgctcaattcaacataccattctactaacatgtcagcctcatatccataactttgcttggcagatattgtctcacactaaactgatcctatacat

SEQ ID NO: 302204 - DNA, 406 bp, Glycine max
tcaacacacaatctatgtgtgctacacccctcatattcaatgggctttataagatcgaatatagcaaattaaactgatgtaaatgtgaagcaaactttcacctcacacaagtccataacgtcaatctatacttgctcaaactgaatgtatacctaaaattccaccgaatcaaataagatcttcatcaccattttgccctagaaaagctctcagtcacttttgtcatatgtactcccttagcacagcaacctatctacatgtctacatgacatttcagctaagatgactaaattaacactcattaccacatatatagaacttaccctcccacgctcaagccacactctattcactcattaacacccattatcacttttaccgtaggtaaaatacatttatctctacc

SEQ ID NO: 302205 - DNA, 307 bp, Glycine max
  unsure (1)..(307): unsure at all n locations
tagcgtaacatcaagcgttaacttacagagagtaagtcttgtctttttcactttcaagaattcanaagccgtaagagagtggcgcttatcgcctcctgtcctgctcaccccagcttaaaaactcatgttataaaatggatctgcgacttaacgtaagatattgcacttagcgctgctacaatgaaatctttcttgagaaaaagtggcacttatcgcatcatccacgctgaacgcactgtgtaaagttcaattaccgagaagatgtggggcctatcgcagtgatgtgcgctttgctgaactatcagcc

SEQ ID NO: 302206 - DNA, 412 bp, Glycine max
  unsure (1)..(412): unsure at all n locations
ctttgcaacttaaaatngagagcatgcttaatgctttaattgatagatagaacacagtttacgagttgggacaagaccttgccaaattcatgaatgtcacaccaaaatcttgaaaactgattggaagtaaaacttgcatcttttataaaattccattattatttgaagggcatataaaacaaatgttcatagtagaagaatttacactatttaattaaaaaatgtttttctaaaaaacacccacatttaataatgtagaattgattacaaaaaaaaatgtagaatcaaatttataataaataaatatacacaaatacggaatgcgagggaaaatatccattaaatatatatntagctctatacatgttgattaagttattagttacttacagctgttaaaagaaaatactaa

SEQ ID NO: 302207 - DNA, 321 bp, Glycine max
  unsure (1)..(321): unsure at all n locations
tttctngcgtatgtttatgagttgaattgattgactgcatgaatgtattgaattgtgacgtgtatatcatatgctttgaatatgtatgctgtgattagaacagaatgaacactatttacgagcatgactgacattgttacttggtttgactgcaaattatatgacattcgttagccatatccaggtggatttgtgatctctaattgtgagagaacgactagcattatgtactcagttttgcatgaatctctgaatattgaatgactgcatgagtctcaagaatacgaatgccatgattgttcgacattacctcttatccat

SEQ ID NO: 302208 - DNA, 324 bp, Glycine max
  unsure (1)..(324): unsure at all n locations
cgagacccatcttcaagacataaacaagacacaacactttgtgcgtgatcttcaaatcaaatagggtcagtaacagttccacctatgtntcattacaacaacagagcgagactagaattgacttcatggaagacaaggctgacctcatccattggaattacacttgatggaaaattggtatcatcccttaatggcttctagagctcgagttactcgggttgttttgtggtttcatcatgctactgtggccataacagtataaacacaccgcaactatctacgtagataaaacctcatcatngcgctaggtagaataagaaatca

SEQ ID NO: 302209 - DNA, 253 bp, Glycine max
  unsure (1)..(253): unsure at all n locations
tcttgcttgtacgtttttcatccataaacctatgtggaacatttgacattgttataccctaatttcgtccggtgattatgattngatgatatacaacctctgattggccgcttcaagatacttggcaccctgtgctgcacaatatgtgaattcccgagatgtgcccaaaatcaaaaagaagcatgcgtacgcgatccgtgaaaatttcgcaatgtgacataaatcgtatggaagtgtttttcgcataccgcga

SEQ ID NO: 302210 - DNA, 304 bp, Glycine max
gtcattctacacctaaataagatgaggacatagccgctcttaagatataacttcctaacaaatattttcatgcaggtggagcttcttctagtaatttagacttaccgcaacctcttatccctcttccattcccacctagagcaattccagacaaaaaaatggaagaagtagaaaatgagatcttggagaccttcatgaaagtagaggtgaacatacctcttctagatgccatcaagtttattccaagatatgccaagtttctaaaggagctgtgcacccacaaaatgaagctcatatgcaatga

SEQ ID NO: 302211 - DNA, 352 bp, Glycine max
  unsure (1)..(352): unsure at all n locations
agctntgaaaagtgttgtntttcaccttctcgctaagccaatttgttggcttaacgagcttccactaagcgcaacactcatgggctaagcgcgaggaagactctggaagaagatgagttgcacagattcgctaagcacaccgcttcatctcactaagcgcactgcttcagttcatccggtaagcgagaaaggcacgtgctaagccaaaattcactaatgtgcactaagcggtccataagtgcgcttagcgcacgagcacgaacaaggccacctatttaagcctgaaatcagattctagagagagagtttggactgggattcacagctttgcatgtctagagattctaaagag

SEQ ID NO: 302212 - DNA, 446 bp, Glycine max
  unsure (1)..(446): unsure at all n locations
cgttntgattattgttgttntcttctcattccccctattaatattacttagactagtcttctatgattgcctttctaagttcttcaaaaactaaggttttatttaatgttgtttgttgtgaccaactatagtnttacacatatgaaagcttgaagcaagtgatgccatctagtattcaacccaacacgtttcagactgtgagttaatgtttgttccttgctcttaaccatcatttntttgtctcattgcaatgaatgtaactgggatgattttacaaatttctatangcagtgtgtggaggattagctggatctatggctgctttattcacgactccttttgatgtgatcaagactagattacagacacatgtatttaattatcatgcccttcaattgtataaattcttattgctactactggtgcagccatctaattagatgttg

SEQ ID NO: 302213 - DNA, 411 bp, Glycine max
  unsure (1)..(411): unsure at all n locations
tgcaagcttgctttactatcatgaaactcgtcttgcccgctacaataaagaagcataagtgctaatttctttgtccttgaactacactcaacgctattngcaccaaaattattacaaattatggtgattctggtggtttttagggttcatatggtcgtggtggttttcctaaccgcagtgttagatgcggtggtggtggctccagcagaagtcgtggtggtggtcagtttgccaacttttagtatcaacatttgccttaagtatggacactgcgcaattttgccactttaagtctgatatgagttttcagcctcatgaatcagtcaccttctttgattctaccacacttcnaccaattccctactccactggttcaatcagagcttctaatacctggattaatcctaattc

SEQ ID NO: 302214 - DNA, 450 bp, Glycine max
  unsure (1)..(450): unsure at all n locations
cgtcgctggagctaacccatcaactgtcctaactctttcagactggtgactcctangctcttgaccttgacttgatagaacctctntttaagcanaggcgcctgactcgatcccatgttttactaaagtgaaacaaaacccagtgcgaatcaagactccgacatctatcatgggtggaatggatgaatgcatgaagaaatgcatatgacacagaccctccgtcgagattgtcctcttcttagatacaacattcgggcagcatggctcctgatgtatgcatntaagaaggcgacacgaaccctccgtcggttcgtgacaaagtgaggggatcaagacgcaacccatgcatgatgcggatgcgataaaggcacaacacgaggatgtacatagtatgacaatatccacaaataatcatacagcaaaggcgtacatgacatttttaaactacat

SEQ ID NO: 302215 - DNA, 426 bp, Glycine max
  unsure (1)..(426): unsure at all n locations
agcttgaaatgatgaagtgtagaatggtgaaacttcttgcttttattcgctgaccacagagtggtacctggagatatgtcgcgggggtcaggagaccttggggacgtcaagtgnggtgctattgcccaaaaccaagcttgaccaatcccgacccaacccgggcatagtcagtcagtgagaacctgtgatgtacctaagcgggcgagctcctggcagtcaacagataaaaggaactaagaccacatagcaaggaggcttgtgtggtggctggccaactgtgaactctgatngatatatgggatatggcctctggtaatcgattaccaagggtgggtaatcgattacaacgcttaaaaatgaagacaggagactaagatggtctctggtaatcgattaccaagggagtgtaatcgattaccaagcttg

SEQ ID NO: 302216 - DNA, 451 bp, Glycine max
  unsure (1)..(451): unsure at all n locations
tatccttatggcttgcctccggacttcaccccccgtgccacccctgatgatttaagccaagcccctactttcgaggggcaactcccaccttatgaagactatcccgggcaagacaatgaggaaggagatacccatcttagccccctgctccacctcaaagatccgtccccccatgaactaccccaaccaaacatagtccgccatatcccgacttcacccacacccgtaaaagaatctgttcccttcgtggaagataagggaaagattgaggtgcttgaagagaggttgagagcagtcgagggcctcggcaattacccattctcggatttagcggatntatgtctcgttcccaacatcgtcatccctcccaagttcaaagtaccggactttgataagtacanagggacgacatgtccgaatgggcatcttcggatgtatttatcgaaagatg

SEQ ID NO: 302217 - DNA, 395 bp, Glycine max
  unsure (1)..(395): unsure at all n locations
agctntgcctttatggctngtacctcatcactntcttccgaagctttaacctcatcgtctctcacagtctttagaattgngagccaatccaatcccttgtgttcggactctcaaccacttatgatagccggcgatgatcccattactgcttcccctaagctctctgtcctttcttcacgccgcatcccatgccttgcgaactcctttgagtaccctcgcgttgtggtcaccgaaaccccgtgcgatgaaaggcgtgatgctttcgtctgatggcactcctctcatggggtagccaagctgtcttatggcgaggacgagattataattaatacaaccccttgttccatcaagggaacatttggacatccttcgcatgaagatagaatccctgattc

SEQ ID NO: 302218 - DNA, 464 bp, Glycine max
  unsure (1)..(464): unsure at all n locations
tgtgcaaatcanatcactcctacatctcatctctagcatgcattttctttctttacccactcctcacgtttggttttttagggaaaacaccataactaaacgcgccgcaagggatccctatcgcaccagatccaaatctagaacgatgggtgatcaagaggagacacaggaacagatgaaagccgacatgtcggctctgaaagaacaaatggcctccatgatggaggccatgttaggtatgaagcagctcatggagaaaaacgcggccactgccgccgctgtcagttcggctgccgaagcagacccgactctcttggcaactacgcaccatcctcccccaagcatagtaggacggngaagggacgcactgtggcacgatggcagccctcacctgtgatacaaccgaacggcttacccttatggattgccgcccaactattcaccacccatcttgcaagaagatg

SEQ ID NO: 302219 - DNA, 141 bp, Glycine max
gctcatatttatggggcaaatttgggggtttatatgcttgatttgttagagatgacgggttggaagggatggccttacgcctatgtggtattctgaaacaatggggcatgccacattgcccccattctcttgcaatttatg

SEQ ID NO: 302220 - DNA, 337 bp, Glycine max
  unsure (1)..(337): unsure at all n locations
agctttgagcatattcaagcaaatatcatctnttttactcggatgtctgattgagtcccgtaatatatcgagacgctcgaagtggaacaccgaatctctgagcatattcaaacgacaataactttgtactcggatgtcagattgagtccagaaatttgtcgagatgcttgaaattgaagaccaaagctctgagcaaattcaaacgacaataactatttactcggatgtgtgactgagtcccgtaatatatcgagacgctcggaattgattatcgaagctctgagcgaattcaaacgacaataactgttactcggatggctgatagagtcccgtacta

SEQ ID NO: 302221 - DNA, 392 bp, Glycine max
  unsure (1)..(392): unsure at all n locations
tctcgacatattacggggactcaatcagacattccgaataanaaagtttattngttgntngaaatnttctcatagccttcaacatttcaagttgtgagccgttttgatatnattacgataccctcaatcggacattccgagtaaaaaagttattggtcgttgaatttgttcagagcttcngcattcaagtccgagcctctcgatatactacgggactcaatcagacctccgagtaaaaggctattgtcgtttgaatatgctcaaaacttcgacattctagtccgagcgtctcgatatattacgggactcaatcagacatccgagttaaaagttattgtcgtttgaatatgcttagagcttctgtattccatttgagcgtctcgatatattac

SEQ ID NO: 302222 - DNA, 446 bp, Glycine max
  unsure (1)..(446): unsure at all n locations
agcttatcatctttaagtgattgatcatttgtagtttaatattttctattcttcttagctcaattgacatctctttgactcttattttctcatcttaactcatttttggtctaaggcaagtgattgagcttaattgagaattgtagctaaatttcaaattttgtgcttacttgacatatctatcttgtgtagggcctagaggagactacagaactccaaatggaatgtgtaagtagtccctagaaagttgagaaaaggatcttcaattgtgttacaaatgctttagccaattctggcatttcaagggtcacattgagcttggaagtcagagcctctgcacttgaataattgngctataagtttggacttttattttgtgaattagtttagttaagtagttaggtagttattatagtatctaagtaagtcactaacactctatatat

SEQ ID NO: 302223 - DNA, 441 bp, Glycine max
  unsure (1)..(441): unsure at all n locations
ctgagatacatgtaaccctgtggcatcatcaaaacattcagcttgatcctttgtctacaatctccccctatatgatgatgacaatcctgaaatcaagacaagctatatacaagatgatagcccgttcacatagcccttactccccctatcttttggcatgtatgcctaactttaatgattttaattgatttctaacccaagttctctccccctttggcaacatcaaaaagaataagcaagacaatcaatagataaacagagtcaaacattaaaccaaaataaatccatacattgtcataatcaaccaaagcaaagtctagaaatataataatagtgcaagattacgataactagagcaacataaagccagatacacggtgatgaaacanagtactaataatacttaatcactaatattacttagtcataataataacatat

SEQ ID NO: 302224 - DNA, 456 bp, Glycine max
  unsure (1)..(456): unsure at all n locations
tgcatgcgtgcatgacgactctacatgatccgcgtgagccttgctcgtatgtcccgtattatgaggcgcacgccacatcactggccgtcgcatcacgacgtagtgactggaacgaccctgtcgttgcccacctgactcgacttgcagcgaatacttctttcggcagctggcgtagaacctaagacgccggcccggatcgcactttcctcatgtcgatctgctgatggcgactggtcctgatgcggacttcatttcttacacctctgcgccgtctatcactaccgatattgtgctctctcancacgagactgatatgccgccgcatagctgtctcaggccagcaccctcctacatcaggtgcgcgacttaatgacagcgtctgagcagacacgaacatgtcgacaactgagtgcgggggtagtcaccaactagtggcgtgggacatcagccatcgcg

SEQ ID NO: 302225 - DNA, 437 bp, Glycine max
  unsure (1)..(437): unsure at all n locations
tagctttctctagttaattatcataagaccccacaagaaagcttccatggtgatccctacaaatttctctaaaccctgcctaagatggtttttccaaaagtcgacttagaatctatagaatttaagataatttttctaattacaatcttagaattttaaaaaaaattaaaaaaacctacagtaatatttttttatcaaataaaaactcaccataattgactatagaatttacaaatcatatttgataaaaatcatctctcttcccaagatgatgatattttgttactcaataaaattaattntaaattcatgattgatttggtgaataaaatcttanaacttataagaaagtcgcatttttcccctaattataccatgcaataatattaaaaaattcaaatgagattntaaattaaattatatatgaagaatattta

SEQ ID NO: 302226 - DNA, 427 bp, Glycine max
  unsure (1)..(427): unsure at all n locations
tggaccaagttacttgtctgcttgaanttttggatttgtcacactattgaactataattattctcaaatactctgattgatgatttgtagttcatacaggctctggttatcagactcctggtttaatgacttgtgaccaaaattggttaatcagtttttatttttttatgtttaggtgtggactttggaatatcttattttagaattcatatatcttgttttatggtgggaaattaaaaaaaagtataaatctggtatgtgtgatattcaacgataataaaacaagtgataaatcaaatattatgttccattntataaatacactagtgctttatgggtgtgcctcttggcactcccactagtcccactgctctaacaattattttatacttcaaatacccttcattgaatactttgtccttatttc

SEQ ID NO: 302227 - DNA, 444 bp, Glycine max
  unsure (1)..(444): unsure at all n locations
ggcatgtttatgcttgtgggattttnntgtgatagtgaattttggccggagaaatgttgagtgaatagataaaagtaccttaccgnngatttgtattttttatgaggtgaattggtgtttttacatttggagttctatagtagcataggcatttgtgacactttttctacttgtganatgccgagtatttgtatgctgcaacttcttgcacnatgtcantgctcatttggctaagaaagattgtttggaggatacttctagttgttgcaataagggaaagcacattagatctattgttgatatatagatactgcacaaagagcttgccaaagaatcccggtgttctcatgaacgaagtaagcatatagatacaacgtatcatttcattagagagtgcattaccaagaaaagaagtagaattgactcatgtgaatactcaagatc

SEQ ID NO: 302228 - DNA, 422 bp, Glycine max
  unsure (1)..(422): unsure at all n locations
ctatntggctttctctntattatgaacaaagatcgaagccatatcttagctagctacacttgttcataataatgcacacaacttcgaaagtggttgcacacttaatcatttacaaaagaagatttttaaagttttatctcatagaaaacacttcgtccaagaatataagccatatagagtatactagattcttanaaacatttatgatatanaaataatatntttatacagactagatggatgctttcaattaagtgaacacttangtatatagaaaaaaacatttgacggcttatgttaagtagatggattattanaaccctagatgggattgtgatgctagtcttaatgatacttgaagaatntacaagacatacacatgacacagaccctagctcttcaatcttggtctttgaccttga

SEQ ID NO: 302229 - DNA, 268 bp, Glycine max
acctcatttctgtagtcgacgacaacgctcgacttgtgaacttatctgccaagagtatataactggaataactaatgtgcctttatcacatctcttcacacagtaatgctgagcaaatgaatgtcagcattcactgtctatctgcattaagtaatgaggaaacgacgagaacagaacctctgaaaatttgaataatctatctatcactccaacgatcgtatgatcatgtatgcattcctcttgctcataaatcctactgggttcaact

SEQ ID NO: 302230 - DNA, 366 bp, Glycine max
  unsure (1)..(366): unsure at all n locations
tgctgatgttgcaggaacatatggtgaaacaaccttgctccatttctttgttaangagattgttcgctcggcacgaatcacagcttcatacaggatcatgcggcataataactaatacataactgaggaagagatcgatgatacgtatggacataatacgactagaactcgtttctgatctaagtgctgagttatgcgctgttaagatgacactcacaattgactcggatgtccttgcacgctctatctcaaacctatcaagtggatcggctaacatgcagaacctgttaacgggtcgtttgtgtgaggatgtaaagagtgacagctttgtcatgtctatgaagtggaatcagaactatgcacaca

SEQ ID NO: 302231 - DNA, 336 bp, Glycine max
agcttttactttatctgtaagctgtagccattaggtcgatcaccatgtagctaatgttgctccccctatctctagcatatcatatgtcaataagtacttgcagtttctcatgatgaaaaatacttgaactatggggcatgtcacttggtttgaaactttattgagactaaggtcgatcaccatggttaggaagttgattgagcacgacatggtgacctcgacacttgttgcctagttttactaagtgaaagcgtcgtgtggacacacttaagctattttttgactaatgataccacattgcatctgatatatgaagcctagtgcttgcatcatact

SEQ ID NO: 302232 - DNA, 294 bp, Glycine max
gtgaatctctcccacgtctcacggagtgtgtcgtcatacccttgttataaagtcgctatgaagttttgctgcacctcttaccaagtattgatgctattattcggatgtgattggagccatgtttttgccttacctgccaatgaaaatctgaaagctctgaggtagacagctacatcatcttcatgtgatgctcccatggtactacataattgcacaacacttattgctgaaaggaggaatgactatgttggtgatatgctatggtccttgttgattagcatagtcaccaagagt

SEQ ID NO: 302233 - DNA, 400 bp, Glycine max
  unsure (1)..(400): unsure at all n locations
agctntgggactgtaaaactatataacagcaccaaggttctagtttaggtctctcttcgattattcgtttttagttttagtctctctctctctctctctcttcttctctctcctattttcgtttttagttntaggcttttcttagacactnttttgttttgcaattccagttttgacttttcattttagcaataaaatnttgttcttcaatctataatttcgttctctattgattaatggaaggctagattttctggtgttgttccttttgaggacgaagcccaactctctntgaggtttcgctggcaatgtggtttcctggcagttntcccttcaccagttatcccaatttcgtgaatattaatcagtgcacgcttcgtgttcgattaattgcctctga

SEQ ID NO: 302234 - DNA, 389 bp, Glycine max
  unsure (1)..(389): unsure at all n locations
tatagaatatataataagagatctatgactattgaagaatctattcatgattcctttgatgagtctaatgttattcctccaagaaaggaaattctagatgatattgcagaatctttagaaaaaatgcatatttatggacaagattctaaaggaaaagggaaaggaagcaatgaagatcctccagaagaagccatatcaaattatgaacttccaagagaatggaaagcttcaagagatcatccccttgacaacattattggtgatatctcanaaggggtaacaactagacattctcttaaagatntatgcaataatatggcttttgtgtctatggttgaacctaaaaatataaatgaagccataatagatgatcattggatagttgctat

SEQ ID NO: 302235 - DNA, 427 bp, Glycine max
  unsure (1)..(427): unsure at all n locations
agcttgaaatgtttaagtgtagaatgttgaaacttcttgctnttattcgctgaccacagagtggtacctggagatatgtcgcgggggtcaggagaccttggggacgtcaagtggggtgctattgcccaaaaccaagcttgaccaatcccgacccaacccgggcatagtcagtcagtgagaacctgtgatgtacctaagcgggcgagctcctggcagtcaacagataaaaggaactaagaccacaaagcaaggatgcttgtgtggtggctggccaactgtgaactttgattgatatatgggatatggcctctggtaatcgattaccaagggtgggtaatcgattacaaggcttaaaaatgaagacaggagactaagatggtctctggtaatcgattaccanaggagtgtaatcgattaccaagcttga

SEQ ID NO: 302236 - DNA, 450 bp, Glycine max
  unsure (1)..(450): unsure at all n locations
tatccttatggcttgcctccggacttcaccccccgtgccaccccggaagatntaagccaagcccctactttcgaggggcaactcccaccttatgaagactatcccgggcaagacaatgaggaaggagatacccatcttagccccctgctccacctcaaagatccgtccccccatgaactaccccaaccaaacatagtccgccatatcccgacttcacccacacccgtaaaagaatctgttcccttcgtggaagataagggaaagattgaggtgcttgaagagaggttgagagcagtcgagggcctcggcaattacccattctcggatttagcggatttatgtctcgttcccaacatcgtcatccctcccaagttcaaagtaccggactttgatatgtacaaagggacgacatgtccgaaggggcatcttctgatgtatttatcgaaagat

SEQ ID NO: 302237 - DNA, 207 bp, Glycine max
ctagatgacacttgacctgcttggcggctcgaccgactataacccttctatttgtaatgctgaatgatactactagacactcatcaaccctccatgtcagacctgatgcaggagcatgaacgcatagcccataatataccgactccccaactaacacgctatctcccacctcttattatttgagcataaaggcattcctttatctct

SEQ ID NO: 302238 - DNA, 299 bp, Glycine max
  unsure (1)..(299): unsure at all n locations
tcntcggagggagagaacgagagagagagagagagtggcacggtttatgaatgataatacggagagaacttgaacgatgaagtgtgtctcacatgtttctcatacatcaatgtagagacctgtgttacacgagtttctatctattgcctatgtcactacctagattgagactctcatattcatttcctgagaatgtagaaggaatatgccgagaatatgccctaggcatcttatcatatcccctttatatgccgcaagcatggatcgtgtgactctagcacatgggacgctttcttgag

SEQ ID NO: 302239 - DNA, 443 bp, Glycine max
  unsure (1)..(443): unsure at all n locations
ttagagaccttaggcatgcaagctntgagttctatggccccaatgacatctatccnccacatggaaaaaggccaaggtgtttacatgacattcagaggatgtggcggaacattgacattgtccgcgtacgcttgacatttatggcattaccttacatgggcgcagcaatcgctttccatagtgagctagtaataacctgctctaaggatattcctggccataccatgcccattggcatgtgtcccanatgcacccccgtggatttccttaatcatgtagttcgcctctctggcatctatgcatcgcatgagggtcatgtcgtcgtttcgtttgtacacgatggtaccactcacatagaaactagtatccaatctccgtaacgtgcttttggcattgtcggaaatccctggtggatattctttgttctcgacatactggctaat

SEQ ID NO: 302240 - DNA, 395 bp, Glycine max
  unsure (1)..(395): unsure at all n locations
tctgtccctgagaaactggttcccagaagacaacaggggagtaatgaatgctgaataccctaaccttgcaacatgtccctaggaagtagacacggagatggacaagaaaatccgcagtattgtgagtagcattnttgaatagacgcctctntgtgcctgattgctgagaaaagatgttccaacatcttccaacccaagtgtttctgtgcctgatgctaagaaagatgttccaacatcctccgctccaaatgctgaagccctcccttcacccagtgaagaggaatcaacagaagaagaggatcaagcctcagaggagactcctgcaccacgggcaccagaacctgctccangtgacctcattgacctggaagaagtcgaatctgatgaagaaccca

SEQ ID NO: 302241 - DNA, 450 bp, Glycine max
  unsure (1)..(450): unsure at all n locations
agcttggctaattctgacccaatcctttcatagtcagtcagtgagaacctgtgacgtacctaaacaggcgagctcctggcagtcaaccaataaaagaacaaagtccacgaagcaaggagacttgtgtggtggctggccagctatgtatcttgngtggtatatgaaaattagcctctagtaatcgattaccattcatgggtaatcgattacagggtttanaaatggagacaggatgttaagtagctactggtaatcgattaccaattgtgtgtaatcgattacatactttggtaatcgataccagagaggaaatcccttganaaagatattntgactattgcgtagccgtatgggacgcattgtatgcgtacctatgtagttagatttcttgtgaaagagtctaccctctntcttttatctcttgtagatcgcgatgcagcacagttgatc

SEQ ID NO: 302242 - DNA, 377 bp, Glycine max
  unsure (1)..(377): unsure at all n locations
tccatcanaaagtatatgttctccttctcatatctgtgtcgtggagttcatctaagtttggtggatcatctggaatatttttttgcaatccatattttctcatgaccctatctactacatgtcattccagaattgcaaaacatatgagagatacttttgcacgaagaatcatagatacctcaacattattagttaatcaccttatttgaagtgtctcataaggtgtccaccagaactgcaagacatatattattattgtcacatatttataaatgaataagaaacacaaagaaatacttaatagaaataataaaaaaatgaacttcatccatatgtagtctattaaatatgatgcatataagtctgattgtatgggt

SEQ ID NO: 302243 - DNA, 423 bp, Glycine max
  unsure (1)..(423): unsure at all n locations
agctgtgccatgtttcttcataatattaacactctcccacactcctatctattagtatgctttgaatctctcttctctcatgtataaggtatctttctggttgagctatgaattaattattaatctaattgttaagcagagtaaatgattctattataacgattcttgtagttgattacattgtgtgattgaatattttttttggttggatcatcactattccgtaaggatgacaattggatctattcatctcgtaactntctaattcttccataaataaattcagccaaaatatgcaattatcaaagacaataatggattgcatatgttgagtcaatgctatcattggatggtcagtgaaccatccaacatatttcttataccattggatcaatgggagcaactccaatgggtgtggagagt

SEQ ID NO: 302244 - DNA, 338 bp, Glycine max
tgcagcatccataaacaaataggagacaagatagctataaaaaccttccaagtattcataatctacaacaccatcaaacccatagctttagaatccttggttgaaaaagagaaaaaaaagaagcactatttacaaatgacaaagtcaaacatgcatctaggcacatcacgtacacccattcaaaacatagaaacactagttttttaaaaatattcacaaccatgctttccgtcacgaccgcaacggtatcacaattacaattatggctacatcggacgtattaatctgcaattttctataatgtcataggatcacgatgaaatcgcgaccccgaccat

SEQ ID NO: 302245 - DNA, 405 bp, Glycine max
tagacgaccttgttgagtcgagaatacttgattatatatatggacttgtttgaatatgatgtataaagaggtgaatgtgagcctcttttcccctttgaaagactcgtttaaaataatgttttaaaattacttttaatgaatatttgaattctttatattccttatcacgatatatgtgaggggtagagggtgtcacaactatcatccaaacaatttatgattaatttttgatattatgacatacattcataacctagtccattgtgcatcctaaacataatcgcgatcatgaaaaataagaataggattggagagaaagaataattttcacacagagttgaaataccaagccttgactcacatatctacttgcttgaagtggatccttgaatggataattgttca

SEQ ID NO: 302246 - DNA, 395 bp, Glycine max
  unsure (1)..(395): unsure at all n locations
agctntgatagtttgtcgtctctcttattgtattctcccacgatatacttgagcttgaacttggtgaatgcctttntaagtcaggtagctatggngaagtaccttgtcatttgaggatccttagtttacgaatctccattcagttgtctagtgataaatttggagctgctccagcacttaaagtatttggttcctactctttnttctaatcttaggccgactaagaaagtgtcgcaacatgcccttntgcaggcgagcgaagcaaggctcacgggtgcgctttccaaaggaggaaagatgcgtggagtcgccaccaacgtttttttgtgggaaacgtcggataaaccgaaggaaaccggtcaaaatgaanattctaagttcgggagttgtattac

SEQ ID NO: 302247 - DNA, 350 bp, Glycine max
  unsure (1)..(350): unsure at all n locations
nttatctggtggattcacttttgatcacaactgtaccatattgaatatcattagtcaccacanaaggaccaatccactttgacctcaacttaccactcgtgagtccaagcctagagttatacaataaaactttctgtccaaccacgaagtccttcttagcgatcaaactatcaaggaacttcttggtcttctccttgtagaatttggaattctcataggcttctaaacggatctcatctaactcacttagttggaacttcctttcctttccagcttgatcaatagagaagttgcaggtctttacagcccagtaagctttgtgctctatctctacaggaagatgacatgcc

SEQ ID NO: 302248 - DNA, 287 bp, Glycine max
  unsure (1)..(287): unsure at all n locations
ttagcttccgtgatttgtggagagcctntacacaatcgagaactattatgtattgactcttgctatggtttaacgacaacaggacagtgttaacgtgcgctccatgtttctgatacgaccaacgtataagtcacaatatgaaatcatgaatatctatataaggaaactgaatagcggatcaaacattctggacgttatatcatttgcactgaactatcaatgtgttaccaggcatgaggagtctctggtcatttatgaccacgatcactttctggaattataatccc

SEQ ID NO: 302249 - DNA, 460 bp, Glycine max
  unsure (1)..(460): unsure at all n locations
tgaacacgatcatcgacactgatggaaganctgtgtttgacatgagtggatggaaacttgcttgatgacaacaacgagtatggctgtgtgaactactttgcaattgtctatcctatggagacagcgacaaccaatagtgagtatgatccttatcatataaaaactcgccatcagactttacaattgtggggaactgtgtatattaacatgctcgctgtaagatatgaatactatactcggtaatacaagagaacctcctgaagctttcaatgactaatagagtggggtgaaaggatatacagagaagatcgatggacaaaatcattatcacattctgaaaacacctatcaggttgaaagaatgcatgacttactgctctatatctacacgacatgatgctgcatgctctaacgatgaaagaccggcgagggcacatggtggtctactctctaatgttttn

SEQ ID NO: 302250 - DNA, 276 bp, Glycine max
tgcattcttcttaccctcttattacccacaccatacatcaaacctatcaatgtttagataatgacatctacagaaatgcagttgtgaaaggaaaggggcctaagctctacttgtgatgacaagtttttccctagccatcgttgtcctaataagcaacattctgttctactgtgggaagaagaggatgatcctgcatttcatccagatccaccatacgatgctgacacagctggtgaccccacattgcaagatcatcatttgtcttataatgcttta

SEQ ID NO: 302251 - DNA, 404 bp, Glycine max
  unsure (1)..(404): unsure at all n locations
agcttctgttgtttaacacctctcttgtgcctctgttatccgatttccaacaaggcaaccttggctttgcaccttacggtgagtattctggcgagtcataggtgttatgcagacatctagtcaaagaggctaataattaatgggtgtgggtgttgataaaaccccaaacaatgatgttctaggggtaaaatggattcttgaagcatatatcatgatagggcattgctatagtgcactaattaacactgctattttggccgttattgcagccgctctggctactattaataaacgactccactatcctggtattgactactaaattngatgccctagttaaaaaagtaattaaatggatcatacccaatatacaaaggtagagaaagaccatagagaacctaatg

SEQ ID NO: 302252 - DNA, 451 bp, Glycine max
  unsure (1)..(451): unsure at all n locations
tcagtagcagataaatatctcatacatggctaaaggcatgagatattttcaaagcaaacttatagtcaaatgatgaatgttcattatttttataatttatcttctgaaattgttaatttcatgtttcacctacaagactgcatcatttctttcataataattgttgcaaagcattgaatttgctgacaatgtgttttctagtgatggaatttgttaacaaatatttattgagatttttctgcccaatttgaagccatcaatttgttgattatttgctatatatcataagatggtggtgcatagcaatntttggttgagccatgtctacttagtttgatantttgtactctgtaaaacatactttgtttaattcataccatttctatggaaattttcaattacatgaaatcttaatctttgagcaccaacctcggacatgagcaccaatcta

SEQ ID NO: 302253 - DNA, 257 bp, Glycine max
cgaatcactcggacccgggattcttaagcgacgcagctgcagctgtgctttataccgtgggacggaacggaaatcatgagtacggcaagacgcgcacaacgtcggcacgactgcggagcgactcgaagcgcatggtacagtgatccggggactgatgtgcagccctttcgaacgatcgagaagtgcctaacgggcaggaccctttgcggcctcctgtctcctctattcatagcatataagggagatgcttgccgccc

SEQ ID NO: 302254 - DNA, 397 bp, Glycine max
  unsure (1)..(397): unsure at all n locations
agcttctctctatctataaatacgacatcaaggatcgaacaacgacgacgaacacatacagaanaacaagaagtcgtgaattaagaaacaagaaaaaaaattaagaaatacactgagcttaagagagtccatcctttgtgatatacaaagtacttgtgagagattaaaacttcattgtatattcactctttgggtgttgtaaagaatctctggttctatttcaaaattttgtttatgaaagtcaggagtggcttagtgataaaataatacttaagtgttcttagatttaggagatatctaaggattgtgntagtagtgacctccacaatacttgatagtcaaaagtggtagaaaagaatagtcgttgtaatcaagtttgattagtagaaccttttac

SEQ ID NO: 302255 - DNA, 454 bp, Glycine max
  unsure (1)..(454): unsure at all n locations
tcttggttctccaagctcgatttgcgccagggattcgatcagataagaatggctgagtctgacattccaaaaaccgcatttcgaacacatcaggggcattacgaattcacctaacaatgatcccatggtagtcaaactggagatttctaactttatagtgtgcagagtcttgattgaccagaggagctcgaccaatattctctattggtctaccttcaaaaaatttgatattccaacaagtcagatcaagccattctctgaacaactcataggcttcttgngagagacaacttacacaatgggacatgtcaacttgctaacgactntcagaaacgagaagtgttccaagaccataatgatcaggtatctcctagtcaaagcactcatttcttataatatattaatttggtgggtgcacttaataaattatgggctattatttcaactccctatc

SEQ ID NO: 302256 - DNA, 388 bp, Glycine max
  unsure (1)..(388): unsure at all n locations
ctattagcgacctatgaatactcagcttaaggatttcaaattccgtctgacaaacaataaattaggttttattgtaagtaaataacaaatntagactattaaacaaaatcaacgaagaaaactcaaatacctgaatatcctcccatatcaaatccttctgagcagtagggacttcctttcaggtgtcatatgtcacgtcgaccttatcacgagcgacaatccctaaatatgtttttaatttcttcttgtggggaccgtcggccttgccggtagcaggatcaacgttgaccacaagtctttctgccccaggtggtctagtggccaatgatcatagccgtgtcgccttgcgtgtccgcttcaacgtagatggagacgctgatgcgtctgc

SEQ ID NO: 302257 - DNA, 376 bp, Glycine max
  unsure (1)..(376): unsure at all n locations
agcttgtgcagatctccagctccatgttttggggtacttcanacagctacacacatttcatctgtggttggaaccataaatccaaagggttcccaaaccaatattagtagtgatggcggagcanaccaatcatcattaaaatcaacgganagattagaagacatacaaaggaaaaaaagaagcaagtgatagagaaagttatatggngcgtgcctgacaaaatagaaacggtgaaataagtgctntacagatatactcaccttgtacttccaaacacggtgaaataagtgctttacagacatactcaccttntacttttangtagatagctangtttgtgtaattgtttaagtctgagaatttgataggaatatat

SEQ ID NO: 302258 - DNA, 414 bp, Glycine max
  unsure (1)..(414): unsure at all n locations
ctgtgaataactatagacatagacattaagtgaatagtntaactctcttttttaaaatntaaacataaaaatgttgaaacaaaattntgggctattttcaattcaatatttccttcattctttgtcttatccacccctttgtctgtttcatacttagattgaggaggaaacaatcactttaatctatggaagtggtggacactangttatgttgattccagtggttacctacatctacatgtgcaattctccaattntgttcctactaaaaaagaaaaagaaaacagcagaaaaagtgtcctgatcatggaactgaaaaaatgtttttntatcttgcagctgctagccgataaacaatggagatgaatctaatgccttcactctttcggccttttccgcgctcacatttttgtc

SEQ ID NO: 302259 - DNA, 452 bp, Glycine max
  unsure (1)..(452): unsure at all n locations
agcttgtgaaatttggatatccaccattaaaaacatttctagaaagatctaaataatatttatattatgatttataaataaccatgatcataaccataagcataatagtttacaacaaaatgctctctttgaatcaattgaattagcaactacacatttcctttagattctctatttttctctacattctaactntcaccagtataatttcaatgatgtttctatctcacttagctacttcaaagaaaatgacttcactcaatttcattcataaagaaattgttaaaactcactgtttgtagcttttaacaaggttgttacccagagtacagaaggctaccaaattcaagatatgcaagactacgataattatatccatttgaactcgataaagaattcagaaatatcttctcaaattctttatcattgaggattcagagtacattaagttt

SEQ ID NO: 302260 - DNA, 436 bp, Glycine max
  unsure (1)..(436): unsure at all n locations
atactcagcttctgatattgaatcaagatggattcacgggagtttgatgataacttagatgatgacaaanagcccaagagaatgagttcaagattgaatcaagaacacttcaagaatcaagaggaaatttgatttcaagattcaagaatcaagtttcaagaatcaagaataatcaagttgaagattcaagaatcaagaaaagactcaatcaagataagtactaaaaagttttttcaaaacattgagtagcacatgaatnttccacanaaccttttaccaaagagtttttactctctggtaatcgattaccagtttattgtaatcgattaccagtagcaaagattgttttcaaaaagctttcaactgaatttacaacgttccaattgatttcaaattggtgtaatcgattacaatgatttggtaatcgattaccagt

SEQ ID NO: 302261 - DNA, 398 bp, Glycine max
agccttgacttgagtcatcaagtgattataaatatgtgaccatggcatgagtttcaactaacaatcaatcatcaatcatctttgaatcatctatctttcaatctttacaacatcatctctcaacatctttcaatcaatctttcaatatcttttctatagaattttctaattcatttctcttcatctttctaaaagttttttatcaacactttctcttccaagataagttctttgttcaaaaacttgtgctattcatctttttcattctcttctccctttgccaaaagaacgaaagactaactgcttgaattcttttgtgtttctcttctcccttacaaaagattcaaaggactaaccgcctgagaattcttttgattcttcccttccccttaagcaaa

SEQ ID NO: 302262 - DNA, 426 bp, Glycine max
  unsure (1)..(426): unsure at all n locations
taagagagaatgtggtttatgcaatgattgacctatgcttaagagataatattagaaagtttgaaatggccactaaaatttatgcttaagcgagatttatgttaaggttaagtgaaaattcatgttgaacactttattacatggtttttgaatgaatttaattgaacttaaatgtatggggattatgaaattgctacaattggattctagagctatatgttaggaaattcacatttttaaggattgatcacgtgtgaaagttaagattcatagtgtggaatgcctcacatagcttatggaactactangtgggttcctaagtgtattgttaagaaaatggtgaatttataacataaagggaacttgtggtattaaagttgattgaatgtatacatgcatacatgacattacatgtgggtaggcacg

SEQ ID NO: 302263 - DNA, 385 bp, Glycine max
  unsure (1)..(385): unsure at all n locations
agcttgtgcattcaatatcctgatgagggtgttccctatgttctcaagactggactaatacattngctgcccaagtttcatggtcttgcangtgaatatcctcataagcatcttaaggagttccatattgtttgtttcaccatgaagcccccaaatgtccaggaagatcatatctttttaaaggcttttcctcattctctagagggagtggcaaaagattggctgtattaccttgctcccaggtccattttcagctgggatgaccttcagagggtgttcttggagaaattcttccctgcatctangaccactgccatcagaaaagacatttcangcatcangcaacttagtggagagaacttgtatgagtactgngaaagattca

SEQ ID NO: 302264 - DNA, 392 bp, Glycine max
  unsure (1)..(392): unsure at all n locations
taaaanaatagtcaataaacaacttaagagagaagtagaaatacttggtctatattagttcactcaaatanagctacgtccagctctcctttacataactataanaggatccaataatcaaaactttcattacaactaggtattctatcctaccactcttggctataaaagtattctctatgtcactcttgacacacccttagactccccctgaatctaagaacacttaagtatggtttaacactgagcaactntngattntctcaaacaaaagtttgaatgaatacaatgattcaacaacactcanagagtggataaatagttaaactcaaatgcaaataactttgcttagcaaaggatgaaaagaataagtggtgagtatatcgtccact

SEQ ID NO: 302265 - DNA, 397 bp, Glycine max
  unsure (1)..(397): unsure at all n locations
agcttgcatntctctcccatggctgatatcanatctatgatggtatcaaagctttgctatgctactcacattcttcctctcgattatcatatccttcattcttacatcatgagtgaacaacaacaagatcaatcactcaatgtacgcagtccttattactttcatccgggagaaaatccagggatagctntggtttctccggttcttgattcatccaattataattcatggagttgatctatgcttattgcattaagcacgaagaacaaatatgagtttgtcgatggttctattcgaagacctgcatcagatcatgaacttcatgtagctgggaagggtgcaataatatggtggcttatggttggtcatttagctctctttcattagaaaaaatact

SEQ ID NO: 302266 - DNA, 429 bp, Glycine max
  unsure (1)..(429): unsure at all n locations
ngataagtaacctcatccttactaaattaagtatcttggcaacaaagataaatcacaagatcttttatttggatgtattgngggcagggtgaaattganaggtaggaattagaaagaacaagaaaaagaaaatggatacaaatgaatcataataccttatcagagaatacatcatgcaactaaaacacaagggtaccatacaaggagaaatcataatttgcttcctttcttttcattcctttttcatgaatatggtatctttcattctactagcttgacatnaacagtttttttttttttttttcgtgtcaaacattgctgacacgttattattcaacttttaatccccacaaatttttcatatactgctagcttgaagcactgagtcagtaccaacaattcattagtgagttgttcaatgtattaatc

SEQ ID NO: 302267 - DNA, 388 bp, Glycine max
  unsure (1)..(388): unsure at all n locations
tatcttatccttatggcttgcctccggacttcactccccgtgccactccgaaagatttaagccaagcccctacttttgaggggcaactcccgccttgtgacgactatcccgggcaagacgatgaggaaggagatacccatctcggccccctgctccaccttaatgatccgtccccacatgaactaccccaaccgaacatagtccgccatatcccggcctcacccacacccgtaaaagaatctgttcccttcgcggaagataatggaaagatagaggcgcttgaagagaggttaagagcagtcgagggccttggcaattacccgttctcggatntaagcggattatgtctcgtgcccaatatcgtcattcctcccaagttcaaagtacc

SEQ ID NO: 302268 - DNA, 358 bp, Glycine max
  unsure (1)..(358): unsure at all n locations
tccattgttaaatttcgagcgtctcgatatattatatactctgaatcggacctctgagggaaaagttatgaccatttgaattgctcaagagctntcatagttcaatttctagcgtctcgatatattatgcgcctgaatcaaacctccgagttaaaagctatgaccattngaatntctcgagagcttccgttgttcaatttcgagcgtctctatatgtgatgcgcctaaatcggacatccgaagtaaaagttatatccatttgaatttctcaagagcttccgttgtcaatttaagcgtctctatattgatgcgcctaaatcggacatccgagttaaaagttatgatcatttgatattcg

SEQ ID NO: 302269 - DNA, 338 bp, Glycine max
  unsure (1)..(338): unsure at all n locations
tcttcttcttctcatcacaaccttacaaagaagacaaatagctaccaattcattgcaccttaactctattcattcattcatattcatattagtaaaaagtaaaaaatccatcatcccttacaataaaaagcagaaggggatacaactatcacagaactaatctactttacttaaacaacctcttttgaatcctaactatagaaaatcaaaatcaggacctgatataacaaaaagaaccaaatcaaaattccacaggttgtctaagaacacaactgcaattagcaatcttcctacaagctnggcatattacttaatacaaccaacatcatgctacatga

SEQ ID NO: 302270 - DNA, 408 bp, Glycine max
tgttgtaaacttccttgaacatgtgttgaaatattcgttcttactgccctgttctgaatctgtgtgctaagctatgttccttgagtttttgagtgttaaaatatatgattatccttatatttttcttaaataggagtttttttagaaaaagttatgaataaaacaagttttagaacattttactagataaaatttgtcacgaaaataatctagcaggacagttgtatggattagttattattacagtttcgacctcaaaaatgagtttattgagcgtgaaaatgtaaggtagcatataagatttgcgaaaaaccaattctcggagcatcgagaggactaagaataagttatgagtgagacttggttaactgatcgatagagttgatttggagagtagaaacttacatt

SEQ ID NO: 302271 - DNA, 355 bp, Glycine max
ctattacacacatactgtaatcgattaccagaggatgttttcagagaacattctcaacagtcacatcttattatctgattcttaagtggccatcaaaggcttatatatatgtgactagagacacgaattttataagagtttttcagaacaataaggtctaatcctcttataaagaaaaatcgatttatcctcttacaaattccttggccaaaacactggtgattcaataaggaattatttgagtgctcaaattggtcaatctatctcttttaagagagattacttcttttcttcttcttcattctgaaaagggattaagagaccgatggtctcttggtgtgaaagaattctaaca

SEQ ID NO: 302272 - DNA, 458 bp, Glycine max
  unsure (1)..(458): unsure at all n locations
ctaagcttgccttccttacaagtcctttgctacctcgttagccactggatcttctttgattggaatctccgctgcctgcttaacaaattaaaagagaaatcagtacatgcattacagtataaaagaattttcataatgtcattcaatatcaaattataatatactaacctctgatgctatttataagaaataagttgtaatgtacactaatagattcagaggtagtatcataaatttataaatttttataataattatcttacaaatcatactaaccctaatttttaattgattgattgatactgaccatgtaaagggttttcatgatttgatccaatcacaatatgcaatanatnggttgtcttctatgataactantacaaaaatcataccaataataatttctaattgatagaatacaagtatttatagacacaacatagaagctttactcaaat

SEQ ID NO: 302273 - DNA, 397 bp, Glycine max
  unsure (1)..(397): unsure at all n locations
agcttgttaatggatcaatattcctaatgtgaaactaaatgtcttgaggttttcatgcaggcatcttattcgtgaatttcaagcaacccccttagataactcaatataaaagtactatttgtcaccttataaatgtgattgtgagcagccacaatgctcanaagtcctcctacaaaggaatcagctgctccagttgtgtcaattgcttccacctcaaaaccagcaacccatcctttatagtcctgtgcaacaataaggaacatctatatgattaaacataactaaccaatnttggattagcaaatagatgggaggaaacatttgagctccatttntatgcatttaggattagatatttacactaaaatagtgtttaggactttgcccctgtgactga

SEQ ID NO: 302274 - DNA, 326 bp, Glycine max
  unsure (1)..(326): unsure at all n locations
tnctgaacagattgatcagctgtttcatacagtctagtctgattgtctcctttatcatcaacatcactggccctggcattcaaattctcaatttccacctgttcttcatcttcattgactgtctccaatgagattgcttctgtcgacaaaaatggagtgtgctggtcatttttctccccagaataatcctcataattggctgcagaacctaaatggtcggaaccatgataattacttctcaaacatcttctcattcttgatgaacttttcattaaatctagcttccagaaaacctattatataatcaaatgtttagttaatcaaat

SEQ ID NO: 302275 - DNA, 412 bp, Glycine max
  unsure (1)..(412): unsure at all n locations
agcttcaagaattaatggcctcatcaaactacttgttccccgaaggcaattcaattaataggcctcccatttttaatggagtgggttaccactattggaaaacccgcatgcaaatcttcatagaggctatagatttaaacatttgggaagccatagaaatagggccttatattcccaccatggttgctagaaatacaacaatagaaaagcatagggaagattggagtgagaaagaaagaagactagtacaatataacttaaaagccaaaaacataattacatctgccctgngaatggatgaatactntanggtatcaaactgtaaaagtgaaaatatatgtgggataccctacaagtaacacatgaaggcacaacagatgttaaaagatctaggataaacacattaactcat

SEQ ID NO: 302276 - DNA, 429 bp, Glycine max
  unsure (1)..(429): unsure at all n locations
tgtacgcacatcgttcgcgtgtatgatatccactccacaaggtttgaagtagaggagagcttcaaccctataacgcaacgtggcagacaaaagtgggcagtaaacttgaatggtcgtcattgtcaatgcggaaggtattctgcgcttcactatccatgttcacacattattgcagcttgtggttacgtgagcatgaactactaccaatatatagatgttgtttatacaaacgagcacatcttataagcttactccgcacaatggtggcctcttgggaatgaagcggctattcctccttctgatgacgcatggacacttatccctgacccaactacaattcgtgcgaaaggtcggccaaaatcaacaaggataagaaatgagatggatngtgtcgaaccatctgagcaccgaacaaaatgtagtagatgt

SEQ ID NO: 302277 - DNA, 95 bp, Glycine max
ctttgttctcctcctctctgttctcgttccgtttccgtcgctcgtcggcgctgagttgtctactgcgttgctgtttgttcttccgctgctcgtct

SEQ ID NO: 302278 - DNA, 138 bp, Glycine max
ggaccctagagcacgcagctcaacttctttgcaggaacccacaaacaagcgcacccaaaagaccccacaccttcagccaaatcgcaacacaaactcaaactaccccctcgaatctcgcccccccccccataacgacac

SEQ ID NO: 302279 - DNA, 371 bp, Glycine max
agcttgccttatagagatccatgaaagacaaagcggctgaaggaaccaattccgcgtcctgaatatgacagccatcattttatgagcgctgatcaccaacatcgcttcgacgccatcaaaggatggtcattcctccgggcacacccgtccaacttaaggacaccagtatactgacttccatgaagagatagtttgccggctgtgggcatttttagttacccccatggccacgttcgacacatacatattcttccagtctatgcgcatgcttggcctatagacgatggcgtgcgagatatgcgattctgggcgacgcgccagtggatccctttctatgcggatgccctctaccacgtcctggatatccttta

SEQ ID NO: 302280 - DNA, 402 bp, Glycine max
agctttaatctgtcatatctttctctgaactctgatacttgttgagttctggcccagtggcccctattaatgtaccaaaattagactcttcttgttcaaagaaagtcttggtcatatacatcaatttgagttgaggtccacattattgttatgctactaaactattcaatagtaattcattaaccagggaaaaaaattatatattcatttatgaattcggaattaagaaggaactgattgcactgcaaacttacaaaggtacaagatatttgatcaatgatgaaggcttccacggtgcactctacttgatcgatattgggcaaaacgaccatgctgattcatttgccaaaaatctgtcatatgtgcaagtcatcaagaagatcccagtagttataactgaaa

SEQ ID NO: 302281 - DNA, 336 bp, Glycine max
acttttgtatctaaatgtgtaattcacttacaaatacgaaagatgaaaatataaaatttagtctccaaaagagtataaagtgtgacaaatatatccgatcgttaactttcatccgtcatcgttaataaaatagtctacgtgacacatatggatgaatttgtcactgaaatgattgtcgacgtgttcatctctaattgtcaacataagaacacatttgtcatataatggtttttcttgacttttcgtcttcccactctctgggaataagactagggtaaaatagctattgttgttcatgaatatgtaattcgctgataaatgtgtcactgacagatg

SEQ ID NO: 302282 - DNA, 531 bp, Glycine max
  unsure (1)..(531): unsure at all n locations
ctctccacccttcatatattgcacataataaatcacaccctaaaatttcctccagcaccggcgnntttgatcttatccttacgttacantactcgtaccgagacctctgatcgactgcagcatgcagcttctatcttatattgctatatatagggggagaagtgaataacaatagggttcacgcaccttaagcactatctctatcctcttgagatagccgacgaaaattactctccgtgaacataatccaagctcgagcgcttacccacacccccgcatcgtttcctgagtcattaggccaagatattaaaaagcccctccaaattcatcagctcgaattgagatttctgcggtataacacagcctacctacctttaaccacagctccataattccatctatgtacacgtggcggccacattatgtatcatgttcacttattcccgttccattcgttatataccccttgtgacggcctataccactatttaagctatcctcgctataccaaacaaaataacttcaccgtcc

SEQ ID NO: 302283 - DNA, 391 bp, Glycine max
agcttatgttgtgatttctcatgtcctctaccatagtacaatcgaactgaagatgcgtcttatattaaatatttgaatcttttattcattgtaaacctaattccaactgaatttagattttaaaatttgatataccccccacattcatcatatattttaacatttattaaattttaaagatattgtaaccttaatcaatcttaatatgactatgtcttttaaattatacactatgatacatctcattaataaagaacatagtgcttgatgtatataaattatttgcatacttaccttttcaattctaaaagtgtggtgtctttgatctattcatatttactataataccatacaatatttacgattaataatcaaaacatctatgattaat

SEQ ID NO: 302284 - DNA, 309 bp, Glycine max
gtgttaatgatattcgcttttgttgagcaacaactttgtaaatttagctgctttcttatagtcttgcacttctatgaattgaattatctatggagagttatttcctagctttagtgatagtggaaaacgtgataagatacttgtaaatttgatagaagttgagagatggctggctgtggcttaaacaaattcatgaagtttatgcgaaggtctttctttaaagtgtggttttgaatatatggtgtgacaattgtgattaattcgcgaacatatgtattgcttaaaatagaagatggattgatgttatgt

SEQ ID NO: 302285 - DNA, 365 bp, Glycine max
gatccaaactccagaccagcacacatacccgctgctattgctccgctatgaatataccatctgtgatagagcgggaagaacctatgccattgtccatgcattatcgctgccccccgcgaagcagcagcgcacttctactcatatcgatgcctcaactcgcctctcctgatgatccttgaaaagaatcggcatggcaagcgaagaccaacatctacatacacaatgcacaatgacttgtcgaacatcaagctaccattgtccataatctatcctgtgtaaggacggaaatgctcgcatccattgtccttatcagttatattacctaacccatcaacacaaccgaagctatttcgagacgcaaaccg

SEQ ID NO: 302286 - DNA, 241 bp, Glycine max
gttacggatcgcgtgacaattggctctaagcaattcaatgtgaccagctagaattcgcatgtcaacaaacaaatgtcctcgggcgaaattaggcgatgagaattctacctctttacttatcttttattggaaaaaaagggaagtacagataagacactaatttcgttcgagccgaatctcctcccgaccgatcattagctcaatcagcgaaacctgtcaaaagatagagcataaaagacat

SEQ ID NO: 302287 - DNA, 360 bp, Glycine max
agcttgcctcccagctcgcccaggcgagcagggttgcttcctccagaagcaacagccttctggaggaatcttctggagggcccaagtgggcctggttgctatttgcacccctatttttactaagtacaccccctgccttttctggtgattctttttcgtaaagttacgaaaacttacgaatttcgtaacgatacttgttctctttccgcaatgttaccgaaccttgccgattacataatcatcccatcttttgacttaccgaatgttacggaacctcactaattgtgcaacgatgcttccatttgatttccggtgtgtcacggaaccttacggattgtgcatcaatatcttcttttgtct

SEQ ID NO: 302288 - DNA, 389 bp, Glycine max
agcttggatggattgatggcgacccggtgttgagaggaacgaggataaaggctacatgggagtacgtgagctcagttgaatgtgggcaactagggatggtggatttatgtgtgatttgtggatgtggatcctgacttgcaccattacccaatgccacctaataccacatatgactagtaccccataatcctacaagcttgaagtgagaaagtgtggaagagtcagtcttcctacttttattcgttggcaacagagtggtacctgtagatatgtcgtatgggtcatgacaccttgtggacgtcacgtggggtgctattgcccaataccaaacttgaccaatctcgacccaacccgggcatagtcagtcaatgagaacctgtgatgtacct

SEQ ID NO: 302289 - DNA, 296 bp, Glycine max
  unsure (1)..(296): unsure at all n locations
cttagcaagtgaacgggatccattggctaatgtaaccacaggttggttggatggataagactaatgaccaatgttagtagagatatgattagaaactcncaaatccaaggacagagcgacagaggcattggtagttgacaatacaggttgataggcaagataaaatgcttatatgcagtggcagagatagaaataacaagcaattttggaggttgaaacaaaggagcagagaatctggttaaataatatcggcaatgcattgtggttctccattcaatctcgagcaacattcatat

SEQ ID NO: 302290 - DNA, 216 bp, Glycine max
atcttctgtattcaatttcgagcgtctcaatatattacgggactcaatcagacatccgactaaaaagttattgtcgtatgaattagctcggaggttcacaattcaatttccaacgctttaatatattacgctctcactcagacatccgagcaaaagttattgtcgtttgaattatctcagagcttcacaattcaatttcgatcgtctcgatatatt

SEQ ID NO: 302291 - DNA, 300 bp, Glycine max
aattcaaactacaataacttttttactcacatgtctaatacattcccctaaaatatccagacaatcgaaattgaattctgaacctctcagctaatacaaacatcaataatcttttgctcgaatgtctaattgaaatccgtaatctattgaaacgctctaaatataattcttaagctcataactaattcaaaccacaataactttttactctaatgtctgattgagtcccctaatacatcaagacgcttcaaaattcaatgttgaatctctaaacaaattcaaacaacaataactttttac

SEQ ID NO: 302292 - DNA, 286 bp, Glycine max
agcttcggtagaaagtgatgaggtacaagccctaatggcagagcttgaaagagcccgggcagtctatgagaagttcaagtccatagccatcaaagtctgaaaagagtatgatgaactaagggacgtcctatggccacagctgaagccttgaacgagaaaccaagaaggctcgaaaggaagaacacgacctaagcaaagtttttaggggctttatagggcatcaatagtgagctcaagctccgaagatgtgaatggaatcatcacgggtcacaggcctgatcttgaa

SEQ ID NO: 302293 - DNA, 337 bp, Glycine max
cccctccaataaatacaaacatcaatgtaaatttacagcaaccttatgcacacacttctttacaaacattcacttgcacaagacattcttataactaacaaaaatgcacccatatacaatcaacgcaccttcgttacctagattatttacatgtacttccaaagtgtatatgttacctacatcacacacatttccttttctaaattcacatacatgcatactctaagcactttgcctatcaaaaattgcatacgtccacatcttggtatttctaatacctatacatacacacacttcatgatgaatctttactatctacacaataaactgctacatt

SEQ ID NO: 302294 - DNA, 104 bp, Glycine max
atcttggtgtttatgattcataagctccaccttgatggggagtgtcaaatgttgaatatctctttctcatcttacccttgactggttactcaatttgtaaccct

SEQ ID NO: 302295 - DNA, 289 bp, Glycine max
  unsure (1)..(289): unsure at all n locations
tctcctttgtcgttcctcccccctctctccttcgctctcttccgccctttccttctttatcctccctctctctctcttttcttcgctttctccctctcctctcctctccccctccttccctcctctcttttcttgttcttccttcctctctcccgcctcctcttcctccgctgcttttnnnntcttgttagccgcgtccagtcgattcttctgttgttttatgatcatactttcgctccattactttcttctttcatatcttcttgatttgcttggagtcctcactgac

SEQ ID NO: 302296 - DNA, 394 bp, Glycine max
  unsure (1)..(394): unsure at all n locations
agctttacatggagctatatcagttcacacaatatagttcaaggaccaaaaagaaataatcattcaagctcaaagtggtcaactaggggaaaacttatcaaaggattcacaagtcttaagaaagcctatcaaggtctcccttttcacaaaattcacaattattcaaggatatgtatgtcaaaacagagaatagaatactgctattgaaaggatcaattctcacacaataagagaatcaaggctcanaactcacctatctgagggtaactctaagaatagttcacaatcatgcatgctaatgtcccctcccgaagaaactccaattacccaataaacacattacttttgttatcaataaaattctaaacccaagacattttcacagtactagaac

SEQ ID NO: 302297 - DNA, 326 bp, Glycine max
  unsure (1)..(326): unsure at all n locations
aattatatgatttgaattttgggcaagagacgttaaccagctttaagcctgtggattccacgacagatctctgtcataagtgttggacttaaccgcaattgaaaccattaagaacgaaaagagcgatagctntttttattctctctaattgcgtcaaaaatttgattccctatgaggctctgagcacatcaaagaaattaaacttaatcatgagattatatataaggatatgcctttccatttgtttagtttaataaattanatattaatccatgactaacagatatcgtcacttagatttgccagctatggtttatagctttcgc

SEQ ID NO: 302298 - DNA, 383 bp, Glycine max
  unsure (1)..(383): unsure at all n locations
agctttgcatgtttagtgattctagagaaagaaagatgagtctttgaatggttgtgagatcctataggtgaaggagacatcctcaccacttgtatttttgcaatctttcatcttgttcttctcttttttgtaaagcgcgcttcctggttatggaaagctaaatcctatgttggatcttctctataggtacttgatgtaaatatctttttatctatttaatgatgttctgtgtgttctctatgctatctgcttttcattctagtatgcctctaccttgatcacatagatgcatgctttgttanggtcatttcacagtggaaactggtctgattcttatgaccttgatacgacacggctaaattgttgtactatcacgaggaatc

SEQ ID NO: 302299 - DNA, 339 bp, Glycine max
  unsure (1)..(339): unsure at all n locations
ctcatccacaaaaaggttaaaacgctgcttactacctatggctgaccaagtcccaagtcaaaagtaagcaaagtactatgtccgtgaccgacaagccatcgcacgttcagctcaagacgttaaagaagcgctactacgaggcaacctagtaccttttaaatctctgcttgctatttgatcactttttgtttctcaagcataccaggacacacctagttgcacatgatcctangagattaaataacacaagcccaagctcggaaggtagtcatacctcacaaaaaatatatatatgtatgtgtaggtaaaaagataccttggatatgcatgtatgtaaac

SEQ ID NO: 302300 - DNA, 390 bp, Glycine max
agctttaacttaatcaattcaaaagccttttgtgcttgttcattccacccaaacgcacccttcttcaaacattcggtcataggacttgctatagtgctaaaattctggataaagcgtcgataaaatgatgcaagacaaggaaagatctcacctccgaactgttgtagggctcggccaagtcttgatagcatccacttttgtttgatcaacggatactccatctttagacaccacatatccaagacacaccacactttcaaccaagaaatcacactttttcctctctccatagagttgttgtgctcttatggtctcaaatatttgtttcaaatgagtgaaatgcccctctatagatttgctatacaccaatgtgtcatcaagataaacaac

SEQ ID NO: 302301 - DNA, 365 bp, Glycine max
  unsure (1)..(365): unsure at all n locations
acacacactcttaacctatatacatataatctcccaccctccctcacttctcctctacttaaacctttctctcttcatatcctcattactatcaattcccaagactaccatactgggnnggccgcatacactcaaatactcattaatctttactcctaagtacaaattaaacccataatatatttaaaatctccaaatttaacactcaacctctccaaaaattcaaatactccataacttttcacaccgatgtcatattatgctcataatatatctagaccctccaaattgaacaacagaagctctctacaaattcatatgctcataacttttgacccaaagtcagattcaccacataatatatc

SEQ ID NO: 302302 - DNA, 376 bp, Glycine max
cgctggtggaatcttgaaatatatgctgaatcgaatctcatatattgtgtgccgtgtccctcttagagattgattcaatgaacttcacgatctattgcctgtataaggcaacccttgcctctacaaccttgacttcaggtcgtctacaaggtgcttcgaggctgatacggctctatgccatctagcccgatatatatctcattctcaatgagaaccattctgttttgcagtgaagaaatgctgccttcaacatgcctatggtcataatggccttaaaccttggaagtgttgctgtcctgtctgctactccacattaagtgatggtctgacgcgttctactaaacgaaagattaatgcttctctctttgactgcact

SEQ ID NO: 302303 - DNA, 128 bp, Glycine max
acgccttcttaaatacgcacagtgggggatagacctagcggcacgagacgctacttccatggtataacgagagatgatctccatgatggtctacactctgccactgtcgtactatgaaaagataatat

SEQ ID NO: 302304 - DNA, 230 bp, Glycine max
aatattgcttgcacatttctggaacttgtatttttatttaatttgctcacaaatatatatatatatatatatatatatatatacttatgattcaattcacatagcttacatgatttctatttctatctctggttatgatattatatatggacaagacaacagatatatctgctctgtgtgctttaatgagagggtaacctataattttggttgctattagaatggtacat

SEQ ID NO: 302305 - DNA, 326 bp, Glycine max
agcttgtattatggtatacatgatacatgtcacggcttgggttgagtcaaagataaaagggatgccctacattatttccatgacacatatgcaaaaatgacgatttggaaattttatgcaaaattggtttctctgcacctatgctgacacttagtgtcaaatttttatggtcatgtgatgctaaggctcaagatttatttcctctattttagtcaacccaacgtttccaaaatatgttcttttatcaatttgagcattaatccgagatcatttgggcgtttgggaaatatttcacagcatttaacctttatgagtattacacattt

SEQ ID NO: 302306 - DNA, 311 bp, Glycine max
  unsure (1)..(311): unsure at all n locations
tttctccatgtataccctcaaatgtcttattctaaatgttgttaacattattctttacacttttcacccattaaacttgctatagaatctacattttattcttcttcttgaaccataaattgtgttgacttttgtcttgttatttattgtcgctgatacctataccattatattcttataaaactattaaagtacaacaaaacctcataaatctagagtgacttgntcacctattgcattcttgtcatacaactcatgtctattcatgaaacttgtcacatgagatttcttatgttttcctcaactttatt

SEQ ID NO: 302307 - DNA, 331 bp, Glycine max
gaaatcctgcaggtattctataaaattaacttgcgagtgttgagatgacagtcatgttacattcatgtgaccacttcgtggccaatgcctatgttattttaagaatgttctttgctcctagaaatctttataaaacttaaattttacttctgataaaattgaaacttcaattatagctaactattttttttatcttagtcattttctatatgtaatatttttgcttttaaataagttatataaatattatattgttctaagaatatgtccatataaataaattaaattaaattgttataacacttgtcacactcatctttacatctatcat

SEQ ID NO: 302308 - DNA, 332 bp, Glycine max
gagctaagcgcgccatgctgtgctaagcctattctgcacacagaaatggtttttgtgtcttcgagcttaatgccagcctgctgcgcttaacgcctgagtaaaacccatacagcgcgcttagctcacatgttgcgctaagcgcccagtcaaaatttcagtttatttttctgtttgtgaaaataacctgtgtgaatctcttgtgtttatttcacatttcgcagatggcatcccacaaaaggaaatctctctctacacctacccaagtcagatttgataggtccatatttacatctctacaagcttgggagacatacactgacattgtggtgcct

SEQ ID NO: 302309 - DNA, 251 bp, Glycine max
ctctatcctccctccttttctcaatctcctcaaatttctttcatattgaacatgcattctctactcttcctaactcacctaacgccgaccacttctgccctaacgcccaccatacttgatcttttctcacttatagacccccgtaatacattcctcgttccggttcatcttccgttgtatcgactccgacattttctacatgtctttattcttactcctacttgtgaccgtcgggatctactatccaacat

SEQ ID NO: 302310 - DNA, 404 bp, Glycine max
attcttttatttaataaagaagcttgagagatatgcaatctctcacagaaactatgatgtcacacaagttcactcgtcaactcaaacaatagatcaaatgataaagatgcaagttgaacgacccggcacagcagctgaccttaaaattgagactaaaagttgcagcaaaggatgcttcaaaggttgatcgaaattcacgcaatcacagcaaaaatatccttgaaaaaataagaacgatgatttggattataaaggagaggaaggttaccagagagaggagaagataaatggaaaggaggctaatcgattggagtatgtatcgtcattggtcacaacttaataaaagaagaaatgggttggctatgtcaaaatagaaatggtctgttagtccattttaccctgac

SEQ ID NO: 302311 - DNA, 333 bp, Glycine max
cttactctatctaagaattctagagtatctaactgaaaataagtacactgacataataataaataaagattaaatgagaagccatttactactaggtactgtaagcattgcttcatttgaaggcaaataatctgtagtcccgagtagctctctgcaagctctagctaatagtagctacctgcctctgccatcttcaatagtttctctcttcaccctttcatctatactacctacttatagttaagaaaaacaaaacccacaaaaatcaaatatacatattcttttgctttatgctaccgatttataaacaaacgattttctgcttctattttg

SEQ ID NO: 302312 - DNA, 493 bp, Glycine max
  unsure (1)..(493): unsure at all n locations
cgaccaccgcgnacaccttggagtttgtattcgatgccatgactatctagggattgagctcgtcncgggatccttagagtcactgcagcatgcaatcttgttatttatacctctccttcctgatggatagagcatgagaccaagcatgataaagattatcccgctccataagtttctgaacatctaaactgtggcacatgatgagaatgcactgtatgaccccgatcaccctcttagcgtcaaaccatgaagatattcaatcacttctgtgagcttgaggcgtttgtcttgatccatacaattcttgacagccttgagctcgttaatttctagtcctgtaagagcatttatcatgcacaatatatcccaccatcctgtgacaaatgctctgctccgaaggggacacaaacacaagtccaattcctttaaaggatgttacatgctctcaatcaatgggaacattcctgatgcaatcccccgcttatcattatgc

SEQ ID NO: 302313 - DNA, 317 bp, Glycine max
accgaaatgaaattattcctgacatatgagatacagtattttatacatggcggtggcgtgagcctgtgtcctctacgtgttggtcaatcaggaggttgaaatgcacgcgtatatagatcgtatttatagaatatatgctgcgcctaattgcttacactaaatattatcaaatacaacaagcactattatatgcatataatttattctttaactagtacatatatgtatttttctttcatatatatgtccatgcgactaccgatctttaatgagtatcacaaaaatccctgcaaatgtttacttatttgacgacgttt

SEQ ID NO: 302314 - DNA, 356 bp, Glycine max
agcttgctttattacaagagaaagatcatgtgactagaattatgaatgataatgttagtcagtttgtcagattgatcgtgaacgaatgcattatccataaaccggtgagagtgtgatccttatcctcgacagaaacgactatcatcagtactgatttgtgcatgaatctctgaagtatggactgaatgcttgatattaataatgatgaaggccatgttcgattgtgataggcacttacccaaaaagctaaccatgtgcttaaatgatttatcccttgaacccaattttgagttgattgattgactgattgattggaacttgagcctatacaatcttaattcttgcttccttgtctt

SEQ ID NO: 302315 - DNA, 397 bp, Glycine max
atatcagattcttcttgcctggcactacaaaacctctctggtgggtcatatagatgtcttcctttaaaatcccatgccagaatgcaagtttaacatttaactggtccaagtgaagattctcgctactatgctaaaataactctgatggtagtatttttacaactggaaagaagatctctgtgaaatcaaatcctttgttcttgtgaaaccctttcaccacaagtctcaccttgtatcttcttctaccgtcagaatctttctttagcctatagacccacctaatctgtaacgcgttcttccttcttgcaatttagttaaagacacgtctattcttctaaaggatgcatctcatcttcatcgtagctccactcatagtgtcatccctgtgtacctactg

SEQ ID NO: 302316 - DNA, 332 bp, Glycine max
  unsure (1)..(332): unsure at all n locations
ctctaacaaagtgacaatcaatctgtgtttgattcttccatgaaaaactatgttggaagcaacgtgaaaagcatccatgtgctactctaatttcaactacatgtgttattttctaatattcttcctcaagtttgagaatatatacaccaagcttgttacaaatatatttagcttgagaccgactataagagattttgcggacatattagctagttgatcattggaaatgacaaaaccagttgtagtttctcttgcgagaanccttttctctaacaaagtaacaatcaattgtgtntgattcttccatganaaactatgttggaagcaacatg

SEQ ID NO: 302317 - DNA, 406 bp, Glycine max
agcttctacttatgtgacagggcgggcttccttcactttcttgcctcaaccgcgagctttgaccaccgctctttcttcccacaatgcttctctctatatccgcctgagtgggtttatagcctaaaccatacttccccgacttcctttggcatttatcaactagttatgccgccgttgtctttgcctaaacccattccgggttcgtaaccgttccccaacataacacgggccatcattactgctgcatcggacaggcaagcttgcccagagaaggagtccacggaggaaatgcttaccacctcaaaagactggaaagcggtttctaatgactcctctgcggcttccacataaggcataaaggatgggcagctcaccaagatgtcttcttcgcctgatacgatgacca

SEQ ID NO: 302318 - DNA, 283 bp, Glycine max
  unsure (1)..(283): unsure at all n locations
gagaaacccatgctgcgactgtcattcctacatggccaaacttcccaccagcccaacaatgttattactcaaccaatatcaactcttctcattacncaccacccaatcatccacaaaggccatccctaaatcaattacaaagcctgtctaccgcacgcccaatgctcaaacaccatctttagtgaacaccaaaaaggaaatttgcagcaaaaagcctgtaggattcaccccacaatctcgggttatatgctaacttgctcccatatctacttgataatgcaat

SEQ ID NO: 302319 - DNA, 411 bp, Glycine max
agcttgcattctcattatcatcttctgatttgacttccaacactctaactcaatttcttacggtgtaagaaaacaaagacttcagaaacgcgtgaactctttcgcggtttccaagaaaccagaacatccaccgtaactccagaacaaaacaacaaacaataaaaccccagaaaagacaattcataatttcatattccgccaaatgacctcatccatatattatattaatacgcactcattaacaccaaaacgaaaaataacactacgagaactcatagaatagaacaatgaacaaaacattaaaactaaaagtttgatgtatatgcactctccattctgctgccgcggtgtctccgaattaaattaattaatttttaatatcattgtcatcatagtcaggggtggacctat

SEQ ID NO: 302320 - DNA, 208 bp, Glycine max
aaaaaaaactatgggaaaagtcataactttgggaaaatcatggttaaaagtattacccctaaacttttcttctaaaattatacacgtggaatcaattacacacaatgggtgaatcgatcacacagtgtattatatgaaaaggtgtgactcttcacaattggattggaatcccaacattcaaattcacttgaaatcgatcactaatata

SEQ ID NO: 302321 - DNA, 328 bp, Glycine max
  unsure (1)..(328): unsure at all n locations
agcgtgagctgtgcgttaagctctcgcactaaccttgagcggcgcgctaagcgagctgtccactttttccattnttcttcaaggctttttcttccacttcttgcctcaattttccttcaaaacacttaaatttttccctcttgacttctactgatcaaaataacaaaaatattaatttcttcattatttcattaaaaataataatcaagtcaagaaattatactcatttattagtcagaatagactattaaattaactcatatttcacagttatcaacaacaattgattaatttaaataaaagccaccattgagtgcatagatcaatt

SEQ ID NO: 302322 - DNA, 288 bp, Glycine max
aaggtgggcatcgaattccttcactaatgccatgtcaatgctgccttcaaagaagttagcgagctccttatgccaaatgctcctctcaatttctctcttgaattcatcaaattttgtaatgtacagcttcacattcctttccggacggaccttccagccaaggacattgttcgcgtaacagtcccagacattctgggataaaaatcttgatctatcctacctagcctgggacactgaagctagtgcttttctattacgagaagccatcggccaaacaaaggactcata

SEQ ID NO: 302323 - DNA, 420 bp, Glycine max
  unsure (1)..(420): unsure at all n locations
gcagcatgctagtttactcgtacaggtgccagtcctgagtgggatggccaaagcgagaatatttacctcaccctctatgaaacgatgaccactgtcccaatcttagtgttacctaatccgaatgaaactttcgtcgtgtattcccatgcctccacgatgggtatcgaggtgtgcttatgcaaaggggacatgtagcggcctatgcttgtcgaccgcttaacatacatgacaggaatcatcctacacactatcttgagcagcagactgtatctttgatcttatacttcggaggcattacctttatggatctcactgtagagcgttactgaccataacagcctgagatatttgtntgatctaaaagaacttaacattacgcacacgcaatggttacagttccctaaagattacgactttccg

SEQ ID NO: 302324 - DNA, 323 bp, Glycine max
atgtaggacccaagtctcatacctagcaattggatcctacaagagttgcttgattcattattgccgctattgtcactatagaagcactttctcaccagtcatgccattacagtgtttctaaagatagccatataatgcttcattttgctattgatacttgcttttattatattgactcgcgatgtttacatttaaatgggtgttttgttcctaatttaccattattgttatgataataactatacttcccttggctgtgtgtttatttccttcccgttttgcaaaaggaaatcagataagcttagttccaacatcttagatga

SEQ ID NO: 302325 - DNA, 202 bp, Glycine max
  unsure (1)..(202): unsure at all n locations
agcttatggtttgatttgtgacctcaccatggaagaggtctccacggaggccattgcctccctcatccaatatctacaacgcggnctttttatgtagcttattcntttggggactttcaattaacacacacagtggccaccccgacgagatcctgcgagccttctgggaggaaggaaaccatatcttttctggggatcttat

SEQ ID NO: 302326 - DNA, 299 bp, Glycine max
taaacatcaattaattcaatactataatatacatatttatacataccacattttaataaatatacttgctcaataattaatttgatctttaaacatcaacatcttaaacacagataacaacatccaataaataataataatatccacacaatagaatacctccacaatcaattccaatttaatttactacgaaaactacaaattcaatccacacatttctacttattacccatatttatttctataaactaaactaacaatctacttatatatacaaacaacttttacttaaatcatta

SEQ ID NO: 302327 - DNA, 318 bp, Glycine max
gggggggggggtgggggggtgggtgcggcgggtggggcggcgggcggggtgccggtgcgcgggggggtggggtcggggtgggttcgggtggggggggggtctgtgaacgggggttgggcctggcctggggggcggcgtgggggggggtggggggggagggtggacgaggagggcgttccggtcgggggtggagtttagtgcgcggttgcggtgggtgcgggggtgaggggcggggggggggggtgggtggggatgctatgggggtgggtggggaggcgggttggggggggctggggggggtttgggcgttgggtgggg

SEQ ID NO: 302328 - DNA, 306 bp, Glycine max
agcttggttttaatttggtgtatggtaaggtatatgtccatgtctaggaatgacataattggtttactttgatgggctaactcaaaaatgatgggacaagtctcgtatatcaacttggataggagggatccctcgcttttgtgcgggccatatgatttttttaaaaaatctatgtgaatgctattatgtgctcaatcttaagtttgctactatgcatattttaacagcttttattgcttttcaaaaatataaatacatatatattattattgtcagctcatgttattaactcaattcctttggtac

SEQ ID NO: 302329 - DNA, 310 bp, Glycine max
  unsure (1)..(310): unsure at all n locations
agcttctctttccgttctccaaattccaccgaatccagggatcatactccatagttcaaagaatataaaattcatggcccagacaaaaatcttccgttcttcttgccattcaaagcacaatagataataaacccacacaccccataccttctccctttttctttttctttattttatgtttattgtgagagaaagaaataaagccgagcgttgagaatcccgtctctgtcaacttncacggtccaataatttcgattcagccattcctgttccttctcttttcttcttcctcggctcctcacttcttctc

SEQ ID NO: 302330 - DNA, 258 bp, Glycine max
  unsure (1)..(258): unsure at all n locations
atctaaaccattctccacataatctatctatgaacatataccaaaacttcgtatcccaaataaatgtattactaactaattgttatttttttttttcacacctaatcctttaatatactaccataataacttaacacaatttaattaattaatcaactactcattaaaccctaaattattatatctcaacattcttcataaaacaaaacaaaanaatcatatgattaattataacactctaaattatacttacccata

SEQ ID NO: 302331 - DNA, 404 bp, Glycine max
  unsure (1)..(404): unsure at all n locations
agcttgttatgccctcaagatgttcaaggagttcatagaaaagtagagtggaagcaaaatcaaagtactcaaaatagatcgtgaccaagaatacctcgcttgtacaaatttctttgagcaacctggattcaaaatcaactaaccaccaatacacacctcaatagaatggagttgttgaaaggaagaacaaaacaatcatggacatggtgaggtgcatgctgaatgccaaacaaatgcctaaggagttttgggtggaagcaattgctaccgctgtctacattttgagtaggtgcccaacanaaagtgtgtgtgataagacaccagagtaagcctggaatggaaggagaccatcaatcagacacctcagatttgttgggtgcatatcatacacacatgtttcaaac

SEQ ID NO: 302332 - DNA, 318 bp, Glycine max
  unsure (1)..(318): unsure at all n locations
taagctcacctccttgagaagcttccttaagaagattcctaaagaagctagagattagctacacatacctgtctaatagctaagctcacctctttgagatgaaaagctagagcttagctacacaccccctataatagctaagctcacccccatgacaaanaaacatganaatacaaaaaaaaagtccttactacaaagactactcaaaattccccgaaatacaaggctaaaaccctatactactagaatggccaaaatacaaggcccaaacgaagaaaaaacctattctaatatttacaaagataagcgggctcatac

SEQ ID NO: 302333 - DNA, 510 bp, Glycine max
  unsure (1)..(510): unsure at all n locations
ncgtgccancgcggancngcgnattgaantttcgtatttgatagacactgacacactacacggcgacatngagctccgcacgagtggatcctctagagtgcatgagcatgtcttcatgctccaattatataaacggcgcacttcgatgtattagaggactgctgtgtacaaatgactacaatttctatctcagaatatgctcacagcgacatatagagtaaaacccggtgtgtatacccgcgaccgaaccacacttaaagccttgagctcattgtccgtgtattatacaagagacccggcatgccattttgatcctttaaatgtactacgcgaaccccttgcagatcctcgagcaagaggaacagttctcacgatttacacacaatcatcccaatcacgctagagtgtgcgtacatacacatgatctcgtccgaactcctgcattaagggattgatgtcgatctttataaaagttgcacacctctcgcctctctctctactgttaccccg

SEQ ID NO: 302334 - DNA, 390 bp, Glycine max
tctatggacgtacctcgactgaaatcctctgatagcccttttgagccatgccacccttatcctttggtgaagctcactacacccctcttagcgaataactctgacatctacttatcccccccgcacccccgagctctgacacagcctgggtaaaagtggggcggttacagcctccttggataacatgtaatgccgtgcccgctacatgatctattccgacccttactgcatgaataccgcatatcgccacactgtcgcccatgcaaaatctgatgtcgtctctcaccggcttctcacgatgtacaactccacgcaacgtcccccatttcaccgaaatgcaccacactggacgaataccacctgactgacacataatcgagagattctgcg

SEQ ID NO: 302335 - DNA, 366 bp, Glycine max
  unsure (1)..(366): unsure at all n locations
agctcgcattctattacacaagtcttgcaattgattacctaaagatatcttcagaaaattatttccaagagtcacatctgttcaaatggtttttacatggccatcaaaggtctatttatatgtgactaggaacacacccccgctgacagtctttttaagaacacaaatgtattatttctcttataaagaaaaatcttcttatcctcttaaaaattccatggccaatacactngcaattcaataacgaattttttgagtgctcaattgctcaatctatctctttcaagagagaattcttctcctcttcatcttacttctaaaaagggattaagagaccgacggtctcttattgtatagaaatctgaa

SEQ ID NO: 302336 - DNA, 294 bp, Glycine max
  unsure (1)..(294): unsure at all n locations
attctcaattctaacaccattnnnnttttataaaaaaaacataattccccatcaaatatctaaacaaaacataacaaacattcagaacggtctttctaccaaacaatatcttaacaatacacaattgtcacctaataaacaataaaaaaagaaaccaccacctaaagtagccctctccctttcattgacaacccaaatcctattccctacccactttctcgcnccccactatacaaaaacacaatatgaaaacgcaaaaacacttatacctaaatgcgcacctaaaaatcattc

SEQ ID NO: 302337 - DNA, 401 bp, Glycine max
  unsure (1)..(401): unsure at all n locations
ctcttagcgagtatcattttcttagtgaggtatcagctctcttagtaagtaagaggaatctggaagggaatttgccacccaagcacgtgctcagcatgttattagctcgcccggcgagtnatcatctcttctggcgcttatcgccctgactcgttaagccaaagtttacttactcgcgctaagcgcgccttcgatgacaaaaagcccttttaaaggctatagggaaacaaaaagagggaggttgatagagtgtgaagaatagagaatagaggtggcaaatagagcaatgaagcgaataccttaactttatgatgatcctagatctatgagcgattcctaggtttgtacacgtggacgagacatgccgaccattgtgtaatctattattttatctgagaccg

SEQ ID NO: 302338 - DNA, 327 bp, Glycine max
  unsure (1)..(327): unsure at all n locations
ttgtagtcatcatcaacacagtatgaggatctttgccctgagccacattagcttcttcattattctgctgatccttcttgaaccaacactcatcagcaaaatgtccatacttctcacagctgtaccactgcactttactcttatcaaactccttcttcttgctatgagctctgtcagagcctcctctcttagaagattcagctctgtcatcagtcttggcctctccattattagaccacattcctttgccttttcccttcttcttggagttctttgaatatttttcttcttcganattgtgcttcagtgcttgttgactgatctctc

SEQ ID NO: 302339 - DNA, 372 bp, Glycine max
agcttatgtctttctttagttataacgttagtttctcttaagtttgtgagtgtttatatagaacgcataaattattttttgagaaagataacgcgcatattgttaagagtaattaaacactctgtgtagtgtgaagctcctccaatctatcatcttatctaaattgagacgtattgaaattttgttgattcttacaacaattaccataaaagtcatatctaacataatttctgattggttaaccgcatgagcatatacgaatcatactcttgctattggttaatcttaacttataccagaaagtcgattcatcttatcttattcttttcttttcagtggtcgttcacgagcttatccgaatcggactttgtc

SEQ ID NO: 302340 - DNA, 328 bp, Glycine max
catgatgcgctggtcgtcagagtacagagcacgacacaagaactagtggagcaaacaagccaaggagcatgacaaatcacagaactaatgatggaacacaacttgagaatgacaaaggctcattgcactggtttgggactccgggcaagcgattacggactgaaataaaatgagaacagattgcatgactaaccagatggcgtgtcacacgtttattcttccaaacccaactgccaattcaaaatcattggttcacccttcttcactcccaataaaacccaactgcctgaatcaacctgattctattatattacattgaatcacgact

SEQ ID NO: 302341 - DNA, 504 bp, Glycine max
  unsure (1)..(504): unsure at all n locations
agtncaaaggcgggagcngaatttgaaacctgaagcaatgcgaacacacggcgaatacagctcgtgacccgtgatactatacactcgacctgtaagcatgcacttcttttatttttatacaacactgaacctctgattcgacttgccggtcatgtggcccaaaacatcttacgaaggggggttgaatcaatcatattgcatactattcccttaatgaaaatcttattttaatttccccagcactctgcacgtccctataaaaaactcttacatgattgatttcaaagaacaaactgaatatatacatcacgctatagtaaattgaccacgttaatgtcatgaaaagtgcctacttgtatatatactggtctgtcacacccttgtgccaccttcatgccccagtcaacctttagcaagtctattagtttgcaaatcctttacaatgttcgacacacaagcgcaatcctactttgtctccgatgtcttataacaagagaccctagc

SEQ ID NO: 302342 - DNA, 217 bp, Glycine max
ccaaacacaacggctgggactctgtgctgcaccagttctccgaggtcaccaatcaagtgcattcctactggaagtccctcgggaacgccgccgctgacgatccgcgttcaccgtcgacggtggcgacgaggattgggattgggatcgcccgcctttcgaggacatcgacgagccagagcgccttctctcggttttcaaggtacacggatttcaattt

SEQ ID NO: 302343 - DNA, 562 bp, Glycine max
  unsure (1)..(562): unsure at all n locations
cgccgcacccatctcnacattcccaaacttctgagcatcgctagcttcacgccatctatatcacaccctcgataacacccgcgcgaggttgatttgatgcgtggccatcacggccaatngacatggacccgggaactgtaagtcaactgcagcagcaacttcaatttatttttcatctcgaacaacacaacaaacaggtcacctcttatatacggcccataacaaatccgcgccagctataataacctcgcacaccgcgctgagaaaactaatctactgtacgcgcccccgcaccccatactttgcacaaactataatgcaacttgcaaaagtgcaggtgctgttcgatctctaccaaacgcaatgtctcccagtatatcatacccgacatgtaccctcaacgtcaacaccactgccatctgtcacaactgtcaatgcacatgctccgtcacacaacataaaacgcacatcatacatagattacataatcgcacctccaaaggcagaccgacacgtcaatcacatagccaaagtgactctccaactgcaaattcgcacgacg

SEQ ID NO: 302344 - DNA, 330 bp, Glycine max
catcgcttgcgtgtatgatatccactcgacaaggttcgaagtagaggagaccttcaatcctataacgcaacgtggcggactaaagtgggcagctaacttgaatggccattattgtaaacccgcacggtattctgcacttcatatacatgttcacacattattgcagtttgcggctacgtgagcctgaactactaccaatatatagatgttgttacacgaatgagaacatccttaaagcatacttcggacatgggtggcctcttgagaatgaagcggcaattccttcttctgatgacgcatggacactaatccctgacccaactacaattc

SEQ ID NO: 302345 - DNA, 326 bp, Glycine max
aaagaaactgagccacccccactcaaccccacggtgggccccacataaaccccaccaaactcgaagtcctcagcactaagtaactccatgaagacattgtatgtcaatcagagaaagttctcattcgtcccaagtttgattgaagacctagacaatccaatggtgagcgtttgtacaatggtgatgtgagaagcaatgagagagagtgttgggctacaatggcttacttgtctgtgacgtgggctaacagccgatgtgcaatggaggcacgacagtcgcggatgcacagcgggttctcttatcaagttgaaaggggagtgacacaa

SEQ ID NO: 302346 - DNA, 344 bp, Glycine max
atcttcatgatgatgaatcaagttgattcaagtaggtttgatgatgaataagatgatgacaaaaagcccaaagaatgatttcaagattaagacaacaagttcaagatcgagataaatttcaagttttatggcaacaaatcaagaagattcatgatcaagagaagtttgatttcaagattcaagagaagatgaattcaagattttagagaagaaatcaagaagactctccaagggaagtattgaaaagatttctcatataactaacatagcacgttattgttgttcacaagaggtttctcacaattttctaagttactagagtttttattttctggtattgatta

SEQ ID NO: 302347 - DNA, 297 bp, Glycine max
aatatcttcactgttatgtacatatatatatctgaaactcacaaactttataggatatgacactattatcccaaatataaaatacgcatatgatctaacataaatacattctctaacttgtcaactctttaaactttaacatgttatttcaagtttttatcttgatccaattgatatcctgaaacaaatatatatctgtacacatgctcaaagtattaccattgtgttactacttaacttccacattcatttatgtgtacacatatggaaacacactataccacccctgcgtgcata

SEQ ID NO: 302348 - DNA, 215 bp, Glycine max
atctttttgttttattctatgcacccgtagaggttcacattgtgtttcgagcatatatatactaatcttgtgtaccttttatacgccctgttgacgtgcttaacccattgcacttaagatcttttagctcactctgaattagaatactgtcttgcgtgagtgatgtatcgaataatccattaactacggataaaataaattcctaccacttagtg

SEQ ID NO: 302349 - DNA, 340 bp, Glycine max
tttccattctccccctttgtttttgaatttatgcttctcttaaaatgaagttgattactcatgtgagttcttgatttaatccccatttctctccccctttggcatcaacaaagagccaaagtgcgtaacaagtataagacaatcatacactattaatcattcacaaggcatgcattgaagaatataaaccaatcatgaagcaagaaacatgactagatcaaatatataaaacaaatcgcatagtcatctaacataattcataattgttcagacacaccatgcaagtaaagaaatactaaattgttcagatgtaataataatatagagtatttggataagt

SEQ ID NO: 302350 - DNA, 321 bp, Glycine max
tttatgactttaattcaaccataattgaggtgcaatatcaagttatcggtctgatcacaaatgaaactggtcccttcgacattacaatttgggatgatcttttaaattgaaattaccccgactattcatggtacttgccaacaatacttatggaaactatgcaacgttctcattcctatctacagcaaaatgtaggtataactaatctcattttcaatgcccttttttctatggaatcatcttatacccacttatatcttttttgtcgcatacatctttcaaaatctattctttcctattactcatattcttctcctcgga

SEQ ID NO: 302351 - DNA, 315 bp, Glycine max
atttaattatttggggtttattatgttgttctagtgatttacaaagacaagcataacgacctgcaaatgggtcggagtgttcgatgggatttgagtctgattatgcaaacggggggcttcaagatgaaattgaagaacacgctctaaagccacacaatttatatttctctctcgcactgctactttccttcactgtaacactctagctttcctaaaatttatttgctcattctttaatttcttacatttgacgatgataatcgtttttgttaatggtgatacgacggaaacgagtgaagagtgaaggatgattca

SEQ ID NO: 302352 - DNA, 392 bp, Glycine max
  unsure (1)..(392): unsure at all n locations
agcttatatgccattcggaatatgggctcgtgtctgtgttggacaacacttagccatgacagaactgaaggtgattttgtctcttattctgctgaagtttcacttctctctctcattaaggtacacccattcacctgccttccgtntgttatagaacctggccagtgagttgttcttatgatgacaagaatttaagcaacaatgtaacagatgaatgatgaaaacatgcaggtaatgggatggttgatatagtcataagacatcatttctctagctgatgaatgctaataagttgtttttttatccaaattagataataatattttttttttatgaaaggaagatattcttatacttcgaagttatgagacgaagatgatcaaaatctatca

SEQ ID NO: 302353 - DNA, 206 bp, Glycine max
acttttcattcttacacttttatgtttatgacaaagataaaacttctctaaactaaactactcattttatatcataaatagagtacattatcctaatactaatcattgagatacgttcatatactacatacactatatttctcctttttttttattcttacactaactccttatatttttgaaaaattaacaattgaacaatcaaa

SEQ ID NO: 302354 - DNA, 130 bp, Glycine max
  unsure (1)..(130): unsure at all n locations
agctcgggtatgtccttctgattctgtctatacatttatgactntatggcataagatgaaattcaaagattggatctcttgttagttgttattaatgaatagcttatacacttgtgcttgagtgaaacag

SEQ ID NO: 302355 - DNA, 406 bp, Glycine max
  unsure (1)..(406): unsure at all n locations
agcttcctttctcctactgttctgtgtcgggccagcaaaactgttgcaggtatctttgcctctgaatgaacgttgtgcttattattatggcctattgcttcagtggcgtagatcccataacaattatgcttgcaccccttttgcttccgagactaactatttgattgtatgttctcttgttactaaacttttgatttttgaccggaactgcatgaggcatgaaagtttcaaagtggttcaaccacagtaaaataggatggtcagtttatntctgggttctatgacaagttttagatctgtcttgattactggaccattggatgagcacccttgtggtgttgaacaactagcttcattcttctggatgtggttatgagctttcgatgctagtggatcttatatatca

SEQ ID NO: 302356 - DNA, 339 bp, Glycine max
tcaaagctaataattaaaacggaatgaaccgagtatcgaactcaacgaaattcttttacttggaaaaatgtcattcaaaatgcaagtgtttgtaaaaaaaaattaagtgtcacgaattgaaaacataggtattttctattctaatcaaagaaacagtaaacgtaagcaattgaatgtgaaaacaattaagtaaaagcgttgggtccttctaccgagatacttgatgcaattagaagttttctctatttaaaactatttttgtgttctatactgaggacaaaaataccaaacattgatgtctcatgagtttggactaaactagaaatatttacaattcta

SEQ ID NO: 302357 - DNA, 224 bp, Glycine max
  unsure (1)..(224): unsure at all n locations
agcttctctttactttatctttagccttgagttgatctatcaaaatgcgaacttttgatctcagctcattttctcgatgcatagaaccattgacgttgaactcagttacttgaaggcgtcccattataccttntaccatccccattaacacctctgtgtattgtctgcctctataaatcttccccaaactacttttgcagcttcttccatataaaatgccactt

SEQ ID NO: 302358 - DNA, 338 bp, Glycine max
tgtcatctaattgtaccatgcctttctctgacatgcctgaattgaaaacaccaccttcttgttcatatgaagcaccattaagtaactaaggacatgattcaattgtctcaaggagaaatttatcccgattctccatggcttctttcatgttcaagcaccactccttcttcttcttcttcacttgtggctccacctgtgacggaggtttcgttgagtactaacgtggaagataattgcactatttggcctgagctcctattaaaggaccctatgctcaaaatgatttcctagtttgagattaatactttgtgtacgtgacattacattagtgttctata

SEQ ID NO: 302359 - DNA, 159 bp, Glycine max
aattctgatcctatctggatgtccaaaaattgacaagttggaacaacatatagtgcagatggaatccttgacatctataattgctgacaaccccgccgtcatacaattgcccctccaatacgaagcttacgaagcattggatatatatccctttgtgga

SEQ ID NO: 302360 - DNA, 240 bp, Glycine max
atgtgcctactcacatgtaatgttatttattaatgcatgcatgttatgatcattcaaatgaatatgttatgccatcacaaattcattcaccaatgtcgacaccataagaggttataaaatgatagatttaccattcatatgctcatcacgcttatagttgaataaggataggaagacattccaacatcttgaattcttggcaacaacttactaaatactgaaatgaatgtgaatgttatg

SEQ ID NO: 302361 - DNA, 321 bp, Glycine max
atggaagctcctcatatctcccacactttgtggggtgggccattcttggatggccttgattttctcaaggtccacttggaccccatttctaccaactacaaaccctaagaacactatcttatctacacccacagtacacactctatatttgcatacagggtgttcttcctaatgactgaaagaacttgcctgagatgtcctaagtgatcatctaagctgctattgtacactaaaatatcatcaaaatacacaactacaaatctacctatgaaatcacttatgacatgatgcataaagctcatacatgagctctgtgcatta

SEQ ID NO: 302362 - DNA, 338 bp, Glycine max
gaaacttatggaagagaagagcaagcgtggacatgaggaacatccgtgtactgaaaacccaacacttaacatcgacccaccatcctcagttgcaagacacttgaagtggaagatcgcccgcacaaagcggtatggccaaatgacgtctgaagtggcacaagatattgcagacaaaattgtgagttcatatattttttggttactgtcattgccaaataatggttagctaacctagtcaactttattttattcaaattcaacaattgtatatccatgcaggattcattacaggaacaagcaacacaggggagttctgttccacatgggcgacaggacat

SEQ ID NO: 302363 - DNA, 376 bp, Glycine max
attttggattatatatgtttgcggctataaacagaagagggtgatatattggtggataaagcaccctgcaccctagaatttgggcacttttgtctatctgatttaagttctagatcctcttctgttatgccccctcattatctggagaagatcatctggaatggatttacatagcgagtcagcaatcatccgtgcactatttatgctagcatgaagagttatgaactgctctactgcacgctgtgggttatggtccttaccataattacttagctctgcatatacactgccaaacacatcatataatacgattgacaaacactcttttatgctgtatcgcacgacggtgacacattataatgcctatccatccata

SEQ ID NO: 302364 - DNA, 265 bp, Glycine max
ttctatcgtttatatgcaaattgtacatgacactaattaaggatgacgagtgatgacaacggttgtgaaaaaatatataaattacactataaagatatctatgcaaaaccatcacaactcagacgtgtaactcctaccccaaacttacaaatacctcaatccaaactcactatagatttctataatcttctattgcttgatgaagccaagtgctaaattcaggattgatgctgcgtaatttctgcttcagaagctctccctgtga

SEQ ID NO: 302365 - DNA, 342 bp, Glycine max
tgaggcagtggataccctccattatgtagtcaatcagtcagactacacagtgcagactctaagaaatgtcacagagtatctcgcgcttgccaaaactatcgctgtggcaaagatgattcttccatctaatatcatggatgatattgataaattgaatgtggatctaaattctgcagcaaatacactgtccgagcagacaaaagaaaattcttttaaaatacgaaaagtattcaatgctgtgtatgctttcataaactctcaattgtcaattacaatttaatattggcaattggcatctggtatccatatattgtaaacttttccatttttgtacgcgtctac

SEQ ID NO: 302366 - DNA, 247 bp, Glycine max
  unsure (1)..(247): unsure at all n locations
cgctactacattagaaatntcagtgcattagcagataccatttgtgcttttgaagtgaatatatgttgatagtcttttaaacgtgtttgagaaaggtttgaagtttgattttctctctttgaaaagtgataccttattaattaatatttacccgtgagatacaataagtatatgttcattggctgttaaacgtgcttttgaaatgagtatatgttcatggccttcttttgatgccttcaagcacatt

SEQ ID NO: 302367 - DNA, 221 bp, Glycine max
atctgcggcttgcaatcttaatttgtatgtcaggcaatagtcatcttcctgagaacaagtgtatttgcgtattgcaatgtttggtttgttaacttaatcgtgcatgatggttgtggtgattttttgctggtggaattttccccattaatttaccatgagttctaactctttggaacaaagttacagaagcatgtgctgtgtgaaatgtaccatttgcattt

SEQ ID NO: 302368 - DNA, 279 bp, Glycine max
ctattccttttactctctcatttctgcgcatactgctatattagtccttatttcatatcctacttctgtacccacttttttaatccaaatcatttattttatcatctaattataccagctttctatgaatcaacactctatatcacactctctattaacatttacttacatttttactcaacctttacactatgtctactgctctctactctgacataactttcccaatttcacctgcttggactccccgtatttctcttcatgttgcggtctttatct

SEQ ID NO: 302369 - DNA, 366 bp, Glycine max
  unsure (1)..(366): unsure at all n locations
atcttttgtattgaactntctcattcctatgttattgcaagcttgtaaggaaacctgacaatatcatcatccttggtaagttcaataccatcttcaatatgcatgagatatctcgcaaacttatctcccgcaatgatcgctgtttctcgcaataacgatctttttgatagctcatgaacgagacttaacaatacatgcacaaatcatttgcgtccttacgcatttcttgacaataacatgtactcgacaaaaattcccttctaataccatcactgtccctccacatggaacatcacaatctaaaatatcctttatgaactatccactgctcacaagcatatctatatgtcatgagtgtgccatccc

SEQ ID NO: 302370 - DNA, 333 bp, Glycine max
atgtagcagatacgtcaggttcaccaacaatagcatcagatgatgaacgacctcaatgtgttagaaaaaggccagcttggatgatcaattatgaggtaactggaatacaccaatctgaagatcctcttatacattctgctttatttttggattgtgaccctacaaatttcgaagaggctataaaagagtcaaaatggagaaaggcgatggatgaagaaattgtagccattgaatgaaacaacacttgggagcttactgatcttccaagggacacaagacaattggtgtcaagtgggtgtacaagacaaagttgaagaaaaatggagatgttga

SEQ ID NO: 302371 - DNA, 400 bp, Glycine max
  unsure (1)..(400): unsure at all n locations
agcttggagttgcatattgctaaggcttctggttttagttactccatattgtcgacaattaacttggggtcctgtcttcatgatctttaagtttaatgtgctaagttgtttcaagtttggtctttggcaagtgtcacaaagatattcatgacccgtaattaataggaaagattcaacacctataggatatgaagaaacttttagcgtattgctaaattgctgatttcttaatatgatgaaagactaactcaatgatgtctactccaatatcaatgatatagagtcttgggaaattgagggtttttgcttactaaaattcaaatactgaaagtnttatttccttaatatcttggttctataaagattgcaataaacaagaagaacagagacactcatcttc

SEQ ID NO: 302372 - DNA, 337 bp, Glycine max
atataatagaaaatactgcttaagccattcaaatcaagtcattttgaatctcaccattagtatcatgcatgtcaaagataaggagaatcacgcatcgtaatgcataacacaaccaaacattataagaaaacatgcttcctaaagccaaccaaggtaaaaatgtattcatatttcatgaactttttcaaaattataagacacatataaccatatataaaaacatggcagaacagtctcaccacatgaacaacatagaccacacatctcagaaaatgagtggtaaggaacaataataaagcactgttaataaaaccgtagatacactaacataacaagg

SEQ ID NO: 302373 - DNA, 318 bp, Glycine max
  unsure (1)..(318): unsure at all n locations
agcttgctttatatgtttatntataggatggatctttgagcttcaataatgtccctcaatcatgattttcatccatggaggtgccgctgatgattaaggagaagaggtgataggaggcgtcatccactagagaatacccctggcacgagaagcttcacaccaagaaagtgtcttggattaaaagcttacagaggaagcgaatcacacagagaggcggggcgtgggaattgaacgaaatcatggagacaagatgaactctgaagtgtgtctcacatgttctacattcatctacattatgacaagtgctacacatgtttc

SEQ ID NO: 302374 - DNA, 290 bp, Glycine max
aacttatctcacttactcccacataacacatctactcgattatatcaacacctgctccccatcatatactctccaagcttctctcaacattccaactatattcatacactcacaacaacactaaacttatctacatccacatatatataagaacaaatattatataactatctccaaaacaccaaccaacatcacaacttttctcacttacataccccattacatttactttaatccaaatctttaaccattggatacactcaaaattcttacttgaattgtctaataca

SEQ ID NO: 302375 - DNA, 402 bp, Glycine max
ttttgttctgttcaaacctgcaaggcgcgaccaaggtgaatattgctacgcacatgccctggtctcgacatagattcatagtgtgcatataggtttcttaactcatgatcatccagtatctgatttgcgcccccacccatgtagtttccagagtaagagtaactacaatagccatcacagcaagctttataactggttggaacaaagttctacacgggaatcgtgcatgcctcacccaggccggctgcaggctggcttatccaccaagaactcgcattgtccatggacctaaaggttcatctttgtgaggtctcgaccgaatatcgttggggacagtcacaccgtacacaaacatcatgtgcgctatgggagactgactggaatggaatgaatgacaatacg

SEQ ID NO: 302376 - DNA, 386 bp, Glycine max
  unsure (1)..(386): unsure at all n locations
ggctctactcttttcagaacttgcatcatcgtagcagttgccaacacagaaggtagataactcatgaacctcgaatctgcaatgttggaaaacaaaacgaaaagcaaattaaaatctaaaaacaatattatgaataagaaaactgacttgcatgaaagatgtaacaaaaatacctccaatgagggagagaagaacgccttcagacttagtgaggaactcccagaagagatgatccttcaatccaagtcttcttgtgaagtaatcaagaaaagagagagaggttggagggttcatcttccatccaagagtgganaggatcaaaatctccatctttntaatcgtcttggcttcgaacaagtatctactcttcttcacctacacaattc

SEQ ID NO: 302377 - DNA, 312 bp, Glycine max
  unsure (1)..(312): unsure at all n locations
aatgacaaaactttttcttgctattttttctctcacagaatcaaattgatccgtaagtcttaaaaattaacttatggatccgtaagggatatttccaccttttgataattagtgctgagtgcaccaacaataatgttaggtgcacctagcagcactcaaaatgaaaccagccagaaatttatgatctgtttagcccacataaaaaataaatgaaaaaaagaggttagaaaatgttgggtctangaggcccaagacagggtagcaaaataatattttgtgggtctaggtgtttctttctgtattaaaaaaaaa

SEQ ID NO: 302378 - DNA, 402 bp, Glycine max
  unsure (1)..(402): unsure at all n locations
agtctttatttcagtggcaccagcaccagtgctccggtcgttaccaccaatgactcgctggccaacaaaaacctgtccaaagagaaaaagtatttatatgggatccaagttaaaaggtattcaatccaaaccgaacggaatatagtatntttatgggatccaagttaaaaggcattagatgttaatttgtaattcttatttcttagttgttataggttgatcaaaaataaatttttatattatttcttaggtggtatagttgtaatccaagttatactatttttatattattccattctttaagaattatgaagacagacaaataatatttatctatctttcacaaaaaaaaaacaaaacactgggttatcacatctgacataatggccactacaatgttct

SEQ ID NO: 302379 - DNA, 332 bp, Glycine max
  unsure (1)..(332): unsure at all n locations
gcaaaacacaccaaatgattatgatgatgtatggctcaaattctcacaaaggtaaactcatcactttcgaattgagctttcaaaactatcatgacatgtagaggagaatcaaagatttcaagtcacaaaatgtcaaaaacttttattttcaaaacaattacccatttcttgaacatatcctataattcaaagaanaacatgcaaagtcgtacatgcacacaaaattgacccanaatattaaactagaaatccgaccaaactaacaacattaacaaattaacacaactaacaaaataacaaaaccgacaaaactagcaaaaccaaagaacact

SEQ ID NO: 302380 - DNA, 406 bp, Glycine max
agtcttcttgttatattgtatgtcctctgacaaatactgtgctaacgaaatggaataataagacaagtgtgttacttacataatcatcgacagtatatgcatttatcaagccttggtggcggatgcattaaatacagtttgttagcaatcgctcttctacttaatttagattcttaatcaatgtcttaaaatactagttagcattttacttatcttaagctatagtatatagcctcgtcctcattaataattggcagtagtaaagcagtaaatttacctggagagtataatggtgaaaggaagggagaaaacgcatcttgcagtactcattatacattcatgtgaacaaaattaatggaatggttgatatatatacagcatgtttcaacttcaatgcaaataaccc

SEQ ID NO: 302381 - DNA, 263 bp, Glycine max
ctcaactaaccacaaaatttgaaatttaactacaattctcaattaacctcaatcatattctttaaaccaaacctgaattaacgtgagaaaataaatctcatacagatgtaaattcatctaagaagaatataaaaatatcacacattccatttggacttctgtactgtcctctacgccttacacaacatatatatgtcaactaagcacacaatctaaaatttagttacaattctcaattaaactcaatcatttacaccaaaact

SEQ ID NO: 302382 - DNA, 405 bp, Glycine max
cttcttgcaattcttcggttccttgaagatatattaacactttctttgcagctgtccagtgctctattcctggattactttgatatctctcaagcattccaaccacaaaagcaatgttaggtcttgtacacaccgcgcatacataaagcttccttaatgaaatgatatggaatgttcctcatctgctccctttcaagctcatttttaagacattgattcatattgaatctatcacctctcacaataggtgccatgtttgctgaacaatctttaatccgatatctttctagaactttatcaatataggcctcttgagacaagccaagaatcccttgagatcggtttctatggatctctatgccaatgacatatgctgcctctcccatatcattcatatcaaaattc

SEQ ID NO: 302383 - DNA, 320 bp, Glycine max
  unsure (1)..(320): unsure at all n locations
ttttctttgctggctgtcagagtctcaccaaaaagaagtcatcatcttctgtaattcatcttgtagctagagtgaagggaagcaagtagacaatcatgcaataagttggaattgattgagcaacacatttaacaagaatctctttactcgcctttgaaagttgtttactcgccaaatgattgatgtggcttcaaattctatctttgatgaggtcaaatactatttttctccatttgccaacagaaggtagtttcaaatatttggtggagcaatagtctttgaaaaacccaagtgtgaagagatgctgangagtataggag

SEQ ID NO: 302384 - DNA, 334 bp, Glycine max
ttcttgccgtcatttatgagggtactttgtatcaatcaatgattatataacatttactacaggtgactatactttgaacttatcttaatttattgatgctattatgaaaattatataagcaactagatgtcccgactagtaacaagagaatatgcaacttgcaggggacttaatattgaattttggtgtcattatgtacccctgttgttttccaccattggattatgcattgagatttacgtaatactattttattttctattttgaatattgcgatttctccttgttatttatctggttttcctaccaattttcttacttgttcatctattat

SEQ ID NO: 302385 - DNA, 294 bp, Glycine max
atctttccatcttttctgactttataaccatcattttatgttttacacttccttttaaaaaccttacacaaacacactttgtaaaacttatctttttatcaaataggtgttattttcttaaacttcactgaacctccatcacattgacatgatttcaatttcaaaatgatgctccttttgtataatccaaaactaccttatccttttcatgtactgacattagtatttgactcaaaatattgttgttaaccttatttctaatatccatattaatttccttcattttcgcctaat

SEQ ID NO: 302386 - DNA, 386 bp, Glycine max
  unsure (1)..(386): unsure at all n locations
agcttgtttcaaaggtgaatgtgttagtatttttatatgcagaagcaaaccaagaaccttgtgtgccatcgtatgttgagaatcatagtgaagaaaatttagcaccaaaacgatctctcagcaaactattgaaagatcaaactttaggaacaaaatgcttttgtggatataagaaggctaaaacgtttacatgatccaaggtctgctatagattcacagcagcaagttgaaacctccagtctctacctaatgtaagtcctgctctgtttcagttctcaatttgtcctttcaatgactattgttgatgctatcatactcactttcctgtttcctcatanttaatggttaacattcggcatattatgaataactttctttaatccttc

SEQ ID NO: 302387 - DNA, 333 bp, Glycine max
  unsure (1)..(333): unsure at all n locations
cgatttctaattatgtgggccattaagtctatcatatgctgacaatagccgagaagcccatgaatctcttcgggggcggagtaggtgtctgccatcgccttggccttggctaacaatcggngaagttcttgactcccgttcaaggtaagagcaaaccgatccatccacatggttgcctcttggtgtaaagagtcgatcacccttcctctagcctctttttccgcatatacttgggcatactcatccgcgattctatgctcgtgggccgtggctagacccaactcttcttggtacttggcgatgatagctaacatgttggtttctgtctcgcat

SEQ ID NO: 302388 - DNA, 235 bp, Glycine max
agtcttcaatctttaatataaatcttcacgacgcgagctccacaatcgttaagggttagtgctttctggggtgatgtaaagcgttaaaggtttcacctatggccttatggggtatactgtctggtcttcgaaccctcctctcacgtcaaagagccgacaaaatattaattaaaatacatagacgatcttatgcgacaccatgccattagtttatttgaactttacattctatgac

SEQ ID NO: 302389 - DNA, 313 bp, Glycine max
ctgcttactaatcaacataggagatacaccaaaagtcaaaaatagaacaatagttggaacaatagataaaaggtaacctatgtttctaacaaagtcactaatcaatactattgttacttatgaaatgaaatatgacaatgatatggacaacaaagactaagaaaaagcacatcatacatgccattgtatcatcaggaaaagacacagaaccaccataccaccatagttgtcttctacgctagtattgttgatgactcatacagcggatatagctcgggcacacatcatgggtaacaaatagataaagatgcta

SEQ ID NO: 302390 - DNA, 54 bp, Glycine max
ccccaccataaaaaaccccccaccccccccagcgcgtactgaactgatcccccc

SEQ ID NO: 302391 - DNA, 323 bp, Glycine max
  unsure (1)..(323): unsure at all n locations
agctttggattactcagttcatcagaatgctagacgaaatatagatgggaatagaggtaacaatggccgtaatgacggaccgaggcagaaccgggttgagggagtaaagctcaatgttcctcccttcaaaggtagaagtgatccagatgcctacctgnactgggaaatgaagactgagcacgtatttgcctgcaatgactacactgatgcgcagaaagtcaagctagcagcagctgaattctccgactatgcccttgtttggtggcataaataccanagagaaatgttgagagaggaacngcgagaggtagatacatggactg

SEQ ID NO: 302392 - DNA, 428 bp, Glycine max
  unsure (1)..(428): unsure at all n locations
ntgagcaaattcaaacgacaataactntngaatcggattttcgattttgtctcatagaatatcgagacactcgtaattgaaaacggaagttctgagaaaaatcaaacgacaataagttttaactcggatgtcctattgagccctgttatatatcgagacgctagtgattgaaaacggaagctttgacaaaaatcaaacgataataatttttaactcggatgtccgattgagtcccgtaatatatcgagacgctcataattgaaaactgaagctcttagcaaattcaaacgactataaattctgactcggatgtccgactgtgtcccgtacgatatagagatgctcgtaattgacaacagaaactctgagaaacatcaaacgacaataacttttaacttggatgtccgattgaccccttaatatatcga

SEQ ID NO: 302393 - DNA, 435 bp, Glycine max
  unsure (1)..(435): unsure at all n locations
agcttgcttctacaatctttctcctttttatgatgacaaacctaaaatcaagaaacacatacaaactctatcttctaatcgatcactcacttaattccccccctttgttttttgagtttaaacttcacttgaagttaagttatttaattatatgagttcttgattcagtcccaattttttctcccctttggcatcaacaaaaagccaaagtgcgtatagagacattaaatcatacacaaactcataatcatncaagcattttaatccatacaacaagcaaggaggacaataattcatacataaactaagcagggaagatataattcatccattaactataataaaatgtcagaataatagaaagtcatcccagataaccannattaaacaacctaattagaaagtaatatactaataagtgtatcaaataagtca

SEQ ID NO: 302394 - DNA, 420 bp, Glycine max
  unsure (1)..(420): unsure at all n locations
cttctagtatttataagtcttcttgttcaagtgtgctttgtctctaattgaatataagncttctcttgagctaatgtctaatgctcatggtcgttggagcatttaatgcttacattaaatgcatgtattttttcatgttgaaacaccattctggttgactgttgtgttgagcactatagtaaaaaccacttcctttgactaaaggacaatatcacaagaaggggtcttgaattgcgattctatatcttggtttttttaaatccttttcacactcaaaccaagttttcctccgaaagaaaaactttgtaaaatagataacaaattttcaaaaacacaatcaaatgatgaaagatgattntgccaagcccaagatatnttcaaatgtataaatgagaattcaaaccctaggtcaattaaagc

SEQ ID NO: 302395 - DNA, 438 bp, Glycine max
agcttcatgtaatgtgctataagttggggcactggagggaagaggtgttgggcttgttcttcgagcccagtggcctaccacgtggcatgtttgtaggtgggtttgtgaaagctagtaaggtggtcccaagaggatcccttgtctgagtatgagaaaggaaattctacgaaagggagttcgccatggaattgtctgtcataatgacaaagaggtgaatggaatgagaggaggaaaaaatgtaagaggtgtatgaaatgtttcaagacatgtattctgtagagatagggggagcaatatgaacactaagctttggagcttgaagtagtattatctatctacatgcctaactctatgcgtggtattcgtatagattggtgcatctcattctctatcttctcatatgcatatcatgcattatcatgtacacgcaggaacatt

SEQ ID NO: 302396 - DNA, 461 bp, Glycine max
tggcttctcttgcttagtgcattctattctattgtatcgctcgcttagtgggctcttctcgcttaacgcattctattcaggtatgcacgcttagcacctattgcgcgctcaacacacgtgacaactctcgagcttaacgcctctcttagcgcttgtgccttcctgacccgcttagtgcatgttgcgtgctaagcgcgagctctgggctgggcctttctgatttcttctttttcttctttgctatttctcactttttgcttttagcacctccagtttttatatctgcagccaaaattaaacacaacatcaattctttaatatttaagcgcacataactactacataattatcttaaagacaattttgcttgattttctactatcaaagtacaattatttagcacgtatcactatatgatggatctaggaactcatcggtaagattaccaaaagctgatgttg

SEQ ID NO: 302397 - DNA, 219 bp, Glycine max
  unsure (1)..(219): unsure at all n locations
gcatgcgtttnctatacactaccaagcccagaggcgttaacggcgccggtggccatgctaactccgctgccggcgtacgtggtgacgttgagttggagccttggggagtcatcgacggcttgagtctgaacggggttggtgagactgttgaagttggagatggatagatgaaagaatagagagcgtggaactgaagaagctccactctttgtctatcgt

SEQ ID NO: 302398 - DNA, 363 bp, Glycine max
  unsure (1)..(363): unsure at all n locations
cgtgtncgtctccatacctgaaacaagacatagaggaatgagtcatgntttctacgcacccctccgagaaagagatatgaacagcaatcaacgggagttcgtgtgagcagttgataaaaactaacctagaatatattggtctgccagaatcactcagaacaaaaaaatgcttcttcctttctctccatgaaatggaagcatcattctgcactttatttattaatgaaacagaatatgatattacactatatatccagtgtcatgccctcttattgcttgaatctaatagcataaacctctgtatgagaacaaatgcagctcttaactggaatttcaaatatctcatcatagctataacaacag

SEQ ID NO: 302399 - DNA, 346 bp, Glycine max
agcttctagtctcaattttgagcgtctcgatatattacccgattcaatcggacatccgagtaaaaagttattgtcttttgaatctcctacaagcttccgttttcaatttgcaacgtctcgaatatattacaggactcaacttgacatccgtgaataaagtgattgtcaatgcaattgtctcagaacttcggatctaaattgtgagcgtctcgatatattgcatgactcattcagacatccgagtgaaaagttattgtcatttgaatttgatacgagcttacgttatcaatttggagcatctctcgataaattacgacactctggtcggcatccgagtaaaaagtca

SEQ ID NO: 302400 - DNA, 463 bp, Glycine max
  unsure (1)..(463): unsure at all n locations
tgaaggcaaactggatgcgttggtcaacttggtaacctatctggccttgaatcacaaatctgtacctgtcgcaagggtttgaggtttgtgctcctctgctgaccaccatacagacctttgcccttccatgcagcaacctagagcaattgagcagcctgaagcttatgcagcacatatatacaatagacctgctcaacctcagcagcaaaatcaaccacagcagagcaattatgacctttccagcaacacatacaaccctggatggaggaattaccctaacctcagatggtccagccctcagcaacaacaacaacagcctgctccttccttccaaaatgcttctggcccaagcagaccatacattcctccaccaatccaacaacagcaacaaccccagatacagccaacaagtgagggccctccacaaccttccctcgaagaacttgtgaggcanatgactatg

SEQ ID NO: 302401 - DNA, 395 bp, Glycine max
tatctttgtttttaagaaaaagtcagtttctcaactcaaacagaaagtgtcagaacatttagcctgaagacttctagtttctgagtaacgagagcatcatgcagaaaataataacagagaaacttcgggtgatgggtgcttagaggatagtcagaatagatgcattgcttcaaaattgtgtcaatccagcagtcatattgaagtctttctcgatgaatctaatattccttctaatgatactttgatgcctcaagatacatttggagggtgaaaatcttagcaactacaggttgagtcaattccacatgttgcacttccagatggaatccagcataagatttctggaagtaaactctggtcttaacataaacagatctaaactcaaagatcaaaat

SEQ ID NO: 302402 - DNA, 467 bp, Glycine max
  unsure (1)..(467): unsure at all n locations
tcccaagtttttaagttcttcctcanaactgtcctaatctaagttcccaaagtcctattaacaacttccgtttgcccatcggtttgtgggtgacaagtggttgaaaataacaatttagtgcccaacttgctccacaaagtcctccaaaaatggcttaagaacttagagtccctatcactaacaatgctccttggcaaaccatggagtctcacaatctccttgaaaaacaaatcagccacatgggaagcatcatcaactttcttacatggaataaaatgagccattntagaaaacctatcaacaaccacaaaaatggaatctctaccattgcttgtttttggcagccccaaaacaaaatccatggataaatcaatccaaggatacttcggaattggcaatggagtatacaatccatgaggctntaccttagactttgcctttntacatacaatgcaatgttcacaaaa

SEQ ID NO: 302403 - DNA, 440 bp, Glycine max
  unsure (1)..(440): unsure at all n locations
agcttatgtcaagggttatttcgntggaagaagtgtatgtaagaaagagctttatcgaagtgtcggaggaaggagagtcgtttctttccgaactaaagcatttgcatcaattgcaagtggtggacttaagcattccatgtgcttgaatttttccaaaggaattgttctttgacaacttaagtgattacaagattgagattgngaacttcaaaactctttcagctggagatttcagaatgcctagtaagtatgaaaattttaaatctttggcattggagctgaaggatgacactgacaatattcactctcagacaggaataaagttgttgtttaaaacagttgaaaattttgtgtgggagagctgaatggtgtcaagatgtattaatgagtcgaaattgatggacttcacatttgaacacttatcatataacaacctacat

SEQ ID NO: 302404 - DNA, 437 bp, Glycine max
  unsure (1)..(437): unsure at all n locations
tctctaaattggttacctgttgcagaaatacattggatctaatatgaaagaacaaaacgcaacatattntactaatgagtgtcttgaagtgtaactatgaggtgaaatcctacatccgatagaaatgaaaaaattaaatatcatataaatgaagaaaaaaaaaattataattaaggttttgaattaaagtgtgatttaagtatacttatgtgattactctaaactcattagtataaatttcaccgatgtttaccgcctcaatttcataacagagtcaatatgccataattgggtatgatgcatcagctcatatgatttagaccaagaagactttctgtttactacaaattaacttgcatttgcagacagaaatggaccaaaaggaataatcagcaaagttgggatatctatattatagttggatgggattacatact

SEQ ID NO: 302405 - DNA, 443 bp, Glycine max
  unsure (1)..(443): unsure at all n locations
tgtctttctttacctataaatacgacaacaagaattgaagaatgatgacaaacaagggcagaaaaaaagagtagtgaatcaagaaatgagagaaaagaaaagtattagttgagaaatacactaagcttaagagagttcattctttataatacacaaagtacttgtgagacattataactttattgtatattcactcattgagtattgtaaagaatctttgattctacatcaaacttttgtttgtgaaattcaagagtgacttagtgaaaaaacaatacgtaggtgttcttagattcaagtggagtctacaggttgtgccaataatgaccataagaatactcataagccaaaagtgatagaaaagaaatcaagtctgattagcggaatcctttactagttggtanagaagaactagacgtaactcaggttgagtgaaccagtat

SEQ ID NO: 302406 - DNA, 424 bp, Glycine max
  unsure (1)..(424): unsure at all n locations
tctcggctcatgctgcgaacgcctctagttcaacactcttgcagcctaaggcacccacccagagggaagctccccaagttccaactccgaacgcgactcgaccggccggtaattccaacacaacaaggaacttccctccgaggccgttgccggaattcaccccgctcccaatgacgtacgaagatcttctaccatccctcatcgccaatcatttggccgtggtaactcccggaagggtcctcgaaccccctttcccgaagtggtatgaccctaatgcaacttgcaagtaccatgggggtgccccggngcattccatcgaacaatgtttggcccttaaatacaacgtccaacatctaatggatgccggatggctgactctncaagaggatcggcccaatgtaaggaccaacccgctcgcaatcat

SEQ ID NO: 302407 - DNA, 381 bp, Glycine max
  unsure (1)..(381): unsure at all n locations
agcttggtttgnttccgcagactcaacagaagtcagttgggatagagatcagactatgtgcatgaatcttacacccagtgggttattgataggaccaagagctttggcctaccctaccgcttacctagatacctatcgtccaccatcccaccatcatccttgcctatcccctttgatactaaggaagagtttcatgaacaattaaccaaagaaaggcaagaaaaagacacttggaagaggagatgccaggagctcgagcaagagaatgagactctgaaggggaagatagcccaacagagccgttgagtttttatccagaaccagaggatgattgagaaggacgacttgcttcgtccatagacgctttgtccaccgagatgc

SEQ ID NO: 302408 - DNA, 454 bp, Glycine max
  unsure (1)..(454): unsure at all n locations
actcaagcttgaggttgtgaaaagaatagagtccatcatcaccaacttcttcttgtagaagaattctattggtctcctgagatttcacaagatacacatgagggtgaaacagagttgtcttacgcaaattgactcacacttaactgatttttcgaaattgaaggaacatgtaacaacttatgaagcttaaaggttatggcactgtcattacgagatacaaaaattgacgaatcggagttggagatacttaaacctttaccattgcctatgaaaatctgctangtctatcaaaatgagtaaattgtatattattttgagagtcaccagtcacatgaaaactggctctagaatctagtatccaagtggagccagatgcatcattaccatgacaggaggagtttgtgagcatggcattgggctgactgggactacgaacagtggacttagcattggc

SEQ ID NO: 302409 - DNA, 431 bp, Glycine max
  unsure (1)..(431): unsure at all n locations
ttcttgaccaatcccaacccaacccgggcatagtcggtcagtgagaacctgtgatgtacctaagcaggcgagctcctggcagtcaacagataaaaggaaaacaagaccacaaagcaaggaggcttgtggtggctggccagctgtgaattttgtgtaatatgtggattgtggtctctggtaatcgattaccaaaggtgagtaatcgattacaaggcttaaaattgaggacaggaggctaagatggtctctggtaatcgattaccaaggggtgtaatcgattaccaggcttganaacgaagtcaggaaacttagggagcctctggtaatcgattaccagcctgtgtaatcgattacacagaggaatgggtcactggtaatcgattaccacgcatgtgtaatcgattacacagtgtattattgcatatttcatg

SEQ ID NO: 302410 - DNA, 464 bp, Glycine max
  unsure (1)..(464): unsure at all n locations
tgtgattgttaaaaatatatataaaaagattaaatccttgaggttntgcacttgcacgtttgagaagaaaactcactcgaccaggagcttgtggaaaatgcccaaagacaattgtgataatagggtacatctgatgttagtcactcatgcagactccttaggattccttatgaatccaaaggtggcctttcttgtacaaattctttcgggatcaacccatgacatcaagttttagcaagatcaactgacccatggcatgactctatgatattaaatcacgaaagtttcacttggtcacataccaaagtgtgacaatccattgccatccttcaatggggtgcatgatcgatcccaaagccatatattttcttgttgtgcagaataatcaaagctnttaaacgacaagggatgaaccttaggatctaaatctcaggtgattaattaaatgttgaatggctccacta

SEQ ID NO: 302411 - DNA, 273 bp, Glycine max
  unsure (1)..(273): unsure at all n locations
caagcttgtttangctgcttangtccttggactgaatgattcgttaggattcctcaaagcaactaaatcatgagtggtaatattggggagagacattaaaacctaaagaagagtaacaaaatacatcactcaataactaaagctttagaaattagcatcctcttctttgcaagagaattccaaatggcaaatgcagtcgagcgacaagaaaaaataaagtagccaacagaacaagagacatactaacctgcctgggagctgcgtgtctatcac

SEQ ID NO: 302412 - DNA, 444 bp, Glycine max
  unsure (1)..(444): unsure at all n locations
acatactgtgtaatattattagtaagaaacatagccttctatatttgataactaaaccttcttctccttttgcattcgtatacggcatgaaatatgttactcctggaaagtccccaccttctacttcggccaatccaccatacacaacatcaccccacccaaaatcgacttttccaaaatgataatatatatctcaagtctgacacaacatataacaccttacagttgcgaataagcatcgatccttaatcaccattagatctgccacagaatgcatatactcctccgtcacctaactnttcactaggttgattccactgcatacccaaatggatttgcacaaagctatcctgcagcggtgactgctgcacggtatggaacagcattgccgtaataacctacgggtaactgatgatagaaccgtgcacgtgcatcgactatgca

SEQ ID NO: 302413 - DNA, 402 bp, Glycine max
  unsure (1)..(402): unsure at all n locations
agcttgagtgttattctgttgaggttgagctaagcgcgccatgctgcgctaagcctattctgcaaaaagaaatgttttttgtgtcttcgagcttaatgccagcctgctgcgcttagcgccttgagtaaatttcataaggcgccctaagctcagcatgttgcgctaagcgcccagtcaaaatttcagttttattnttctgtttgtgaaaataaccttgtgtaatctcttgtgtttattttacattntgcagatggcatccaagaaaagaaaatctccttctacacctacccnnagccagattgataggtccagaatcacatccctagaggcttgngagagatacactgacattgtggtgcctcgaaagctactaccagagaggaatgtggtagtttattacac

SEQ ID NO: 302414 - DNA, 501 bp, Glycine max
  unsure (1)..(501): unsure at all n locations
cgatactatagacaactcaagcttgtaggattatggggtacctatcccagtggtactaggtggcggtctggctatggtgcacaacaagttctccacatccacaatgcgcgcataaacccaccatcccctgtggcccacctccaactgagctcacgtactcccatgtagcccatatccccgtttctctcaacaccggatccccatcaatcctcccaagcttccacaacatccaagcaaaacaacattcaaatagaacaagctatcacagccaagcaaaacagagcaaaggcagacaactctgccaaaacgccaaccaaatcacagcttttctcacttaaagaccccagtaacaattccctcgttccggttcatcaaccgttggatcgactcgaaaantttactagaagtctctagtacttaagcctacattgtgaccgttgggatctactagcaaacatccagaactcattctgtactgctcttcccacagccaaccacaca

SEQ ID NO: 302415 - DNA, 459 bp, Glycine max
  unsure (1)..(459): unsure at all n locations
agctttattacactcatatagtagtttcacaccatccgtgccaccaaaaccccaaaaaccacatcaaaaccatcgaaatgaacattnttacgaactttcaatagtgctcatggagggaaaatgaacacggaaaacaagagggaaaagataagggttccttatcattgaactagccctcaaactcaactaaagcacaactaccaagtcccttgagtagcggaattcaaggtctcaagctctctaatgaaaggttatcttggagagagagaagaaagtgaaatgatagtattctaagtggtggttcagactntgaactctttactttgnagttatgactctccctattncttctaatcacacctcttcacttgctaaactcaacccgtcccatccctatactcaagaaccactcatctcgattgaacaaccagcctcatcgctacggatcatactctaatc

SEQ ID NO: 302416 - DNA, 450 bp, Glycine max
  unsure (1)..(450): unsure at all n locations
actagctggatggttggcttatttgacttcttgtcgcttttatacataaacagccccaccatcccaattntgcaaaaatcatattcatatatcattggggcatttcaccgagcactttgtgggcgcacgtttggacacaaattgcaagagaatagggacaatgtggcatgcctcattgcttcagaatacaacctaggcttaaggccttttcattcaaatcctcaattcaagaaaacaagcaccaaagcaaaccaaaactgcctcacaaatataagcatgttctcacaatttaaggcaccaaaagatgaagaaaacacatcaatgggaagcaaaaacatcaaggatggaatacttacttgttggagtgaattgaaacaccaaaaacgaaagcaaaacgcgatcaanaatggcttangggagcaagaaaccgcaagccttcgtgtctttatc

SEQ ID NO: 302417 - DNA, 438 bp, Glycine max
  unsure (1)..(438): unsure at all n locations
agcttgtctgtctgggtggatcaaataaacctgagaattcccagttttagtggaccccaatatatactactctagaaaagagacaaaatagctttttacacttaatttaaccagaaatttgaaaaaacttttgaataaaaggcatgactaattactgtttactaaatgtacacgtaaatacgtttttcatctctcanaatatgacgggtttttacttcttttttgctggataaacgggtttttacttttatccttatacaaattaaattcaatntcagtttttatatntgacaaaaaaatgatatgaatttatacgtccatcaggaactgaaaagaaactaaaaactaatgtattttcaagaatgataataattttcatttatatataatatagttacaattcatttgaaatgatgatatacttaactttatccttat

SEQ ID NO: 302418 - DNA, 466 bp, Glycine max
  unsure (1)..(466): unsure at all n locations
ntataagcgcgggtctgcgggacaaaggtcaagtggtcgcgatgttctatgatgatgttccgagtacattggatttggtacgaccatgctctcctgattcttagctgggaaattggcgagtggaggaacgccccgacatttacgcaacgagcataatgtaaacctttacggttttaaaaaactttatagttaggcctaggctttagagtttcttttgttaaggctttgtgtcttttgttctaaatttataatacaaggatctttcttcatctgttcctacgtctctacccattctcatccatttcatgtttacttctttatttctgaaacggcagatctgatgacgagtcccccgaaggtactaatacctgngacctgcctatcaacttcgagcaagaaacgaatcacacagaagatgaacggaatgaggatgtgagacttcccncggaattagaaaggatagtcg

SEQ ID NO: 302419 - DNA, 375 bp, Glycine max
  unsure (1)..(375): unsure at all n locations
agcttgagcttcctagcttaagcaccataggcattcactagtgcaatgtgatctttagcttgttggtgtatcacatccattcgggtcctaagagggtcagatttcaatgccaaaaaggttctatgcacgtatgcattaccagtcgtgggaagatcctgttaaccaaaaacacctaaacaattacatggtgttcattcaattactcaaatcaccaagtggcaaagtttaaaataacagttcgcaacagcgatttcagcctcaacatcaaggttttggactcatgtaagcaatttcccgcaatgtcaaggatcgcgacgaaaccgcaatctaaaatcttgccatgtgggttatgctttaaactanatctacaaaaat

SEQ ID NO: 302420 - DNA, 477 bp, Glycine max
cttgagacaaggatcctccaaaagcaccacactatctgttttcacataaaactaagagagaggattctaggcttgcagaagtgtcactgcctccgcaaaccagtaccctccctcttcagttcacacaaccctgtaataaagatgagtattgtttctcttgcttacctgcaaattacatcaaaacagcattaaagaagaacaataataacaacactgaaaaacatgtgaagttcgctgaagttatcattcatgtcatgccattatttgagcaattaaaacaaataagctttaatcagctagacaagaaattatgtgcgtgtgtgtgtattatttagaccaattcctattatcctatagtattaactattaaatgacaacaaacatcttggagccacataaatattctatattctacaataatgattgatcatttgtcttgacttagtgcacatgaatatctggtcaatgcagctaatg

SEQ ID NO: 302421 - DNA, 443 bp, Glycine max
  unsure (1)..(443): unsure at all n locations
agcttccactttatccaagcaatttattttccaaatatcatgaactaccctaaaccaagaaaacagggcagaggcagaaaactctgcccaaaacacattcaaataccacagctntccctactcaaataccccagtaacattctctntgttctgattcgttaaccattggatcgacttgaaaantttactagaggttcctagtacataagtctacatcttgaccgttgggatctactagaaaatgtccagaacccaatatgtactacctttcccataaccaacaatgcacaagcattntctgcacatgttgaaaagttctgctgcacaattcaacaacattcttctgcataatanggcagaattcgaaatccatcttgcccacatccaattntgctcanatnggatcctacaagtcctacatcatgtataaatcatatataaat

SEQ ID NO: 302422 - DNA, 425 bp, Glycine max
  unsure (1)..(425): unsure at all n locations
aactcaagcttgagtgtttgctatanaaaacaaactaaaactcgagctttaagttttcatcattcgctatcagctnttcaaagtacagaaggtcacacatgttgcctaaaacatcccacttatctaggcatggcaacggggcccgtcccggacccgccccgattttgacggngaaaatccgagttgatcggggtcagggtcggggtcgggtttttcccgatagccaaattcgggttcggcgtccgggatgggattcttaatacctgccccgaatccgtccccaaaaccgtcccgctaataattaatatatataacacattgaaatatgacactattacattgaatcttatgttagtgtataattgaattttatgtcttatctaaaactatatttcttattctatgaaaaattatatttctttaat

SEQ ID NO: 302423 - DNA, 320 bp, Glycine max
atcttgatatatgaagtgtccaagggtgaaacttcctgcttttattgttgaccacagagtggtacctggagatatgtcgcgggggtcaagagaccttggtgacgtcaggtggggtgctattgcccaaaaccaagcttgaccaattccgacccaacccgggcatagtctgtcatggagaacctgtgatgtacctaagcaggcgagctcctggcagtcaacagataaaaggaacaaagaccacaaagccaggaggcttgtggtagctggccagctgtgaaacttgactgatatgtgagatatggactctggtaatcgattac

SEQ ID NO: 302424 - DNA, 409 bp, Glycine max
  unsure (1)..(409): unsure at all n locations
actaagcttataaaacaaaatgcctaatcattccaaaatgtttgtaatangacgcatcaacaagaataagccaagctattgtgcagcaatcaatggggcaaaacacaccaaatgaaatgatgatggatggctcanattctcacaaaggtaaaatcatcactttcaaattgagctntcaaaactatcatgacatgtagagaagaatcaaggatttcaagtcacaaaatgtcaagaacttttattttcaaaacaattacccatttcttgaacatttcctataattcaaagaaaaacatgcaaagtcatacgtgcacacaaaattgacccanaatattanactaaaaatccgacgaaactaacaacattaacaaattaacacaactaacanattaacataaccaacaaaact

SEQ ID NO: 302425 - DNA, 213 bp, Glycine max
  unsure (1)..(213): unsure at all n locations
atcttattcttttgntctcctaccctctttctaatctatgacactagttttataaaatgatttctaagaataatgatatatgatagcaataaaactcattataattaaattcttcgatctaacgcaacccaggagatatcaaatcatctaacgtatatatatatatatatatatattatatctattataatatatatatatatatatatatat

SEQ ID NO: 302426 - DNA, 250 bp, Glycine max
atatatggttaaatcccaactagctcttgcatatgccaacgttaaggctgtgaattatacataagattcactaaaatacacatctcatgaagctataactaaaaaaatatcttaagatatactaatagctcaattagctcaatattgtataagcatttgacaacttatacacttatccttatctttctaataggagtgagtcgtgtactttaagatttatctaattatgactggttagcatactcatact

SEQ ID NO: 302427 - DNA, 437 bp, Glycine max
  unsure (1)..(437): unsure at all n locations
caggtcccagaaaaagtctccggtatatcaccacaagcccctaccaacaaccgatcctaggccaacacacaatatactacaacaacacagccacaccatgtcatataagacccaacctacaacacggaggacactaacccatagaccgatagcatgcgccactaaaacatcatgcgtctccgacccgtactctaagaccgatacacacaaccgccttacaacggcacacgagcggaatcccgaactaggaacaatgaatcccactcataacacccatcaaccgacgggtacacaaattgcgataatatggcctacggggaacacanacaacgcacggctcacacacaaagacgacatcgcaatngaccgcgagagccacaaacgaacacctagccaccaatcacagaccccgctcctagacacaacagactccgacg

SEQ ID NO: 302428 - DNA, 519 bp, Glycine max
  unsure (1)..(519): unsure at all n locations
ccgcgactggcgttgacacctgatnaccnttcgcaaaacccccgacactatacaacactccacccngaagaccatncatactatgtcatcagcccacttcagctttgctcgataacacagccacagataggggctcgcctagagcacacgatactgctgccaatcaaaccaccaacgtaacacctacacctcgcaccacatctccctaccatgccagtgcgcagcacgctaggttgggacatcctaacagccataccatgaagctacacctcacacattgcaatatttcctcactcaataaaactttatcagactctagctcctgccgctgcatggcataatctcatacattgccctcccactctcctacttctatataccttccttcggagcccatcttacagacctgcggcgaccgctcatgacctcccatgctaccctaactactacgcaccctctacgatgcctcatcagaacactcgatattcctatacaccaacgccaactcccgctccaacc

SEQ ID NO: 302429 - DNA, 444 bp, Glycine max
  unsure (1)..(444): unsure at all n locations
agcttcaccttcaccatatccaacacaccccanaacattcaacaccttcgatctgcactttcttcttctactactcctaatcatcaaatccatcttgctgagttagtacccttcaactctacccaacactccaacaaagacaacaacacacaaaaggctcctctcactgacctattgaaacttggctatgcatcactcacccttgagcctccttttcgctccttgatatcacagatcacagaagaagacggtcaccctccactntgcataatatctgacatgttccttggttgggttaacaatgttgcaaagagcttaagcactangaacctaaccttcaccacttgtggtgcttatggtatcttggcctatatctctatctggtcccaacctcctcataggaaaactgattctgatgagttccatgttccgggaattcctcaa

SEQ ID NO: 302430 - DNA, 425 bp, Glycine max
  unsure (1)..(425): unsure at all n locations
tctgtganattccagatcctgacaacaccttcttcactcttacagacaattcgttcagctcctatatccacagagaagagattgctcttaaatccgcgcaacatcctctgtggaggctctactatgtctccacccaaatgctntacctttgagactctcttcctcagagctcgcttgctaatcttcaacagctgtctcacatcaattagagccagcttgccatcacttgatgcggaaacaagccatggaaactcataggcaagagaatacacaacagctgagtgaggaacagaattagtaaataagctggttttctatattttacgagtaagtcagttttaatggattagcatagtcaataagtggtttctatctttaaggaacaagttagccttaatactctgctttgctaatatctctgtatc

SEQ ID NO: 302431 - DNA, 375 bp, Glycine max
  unsure (1)..(375): unsure at all n locations
atcntgttctcacatcgttcgcgtgtatgacatccactccacaaggtttgaagtacacgagaccttcaatcctattacgcaacgtggcggacaaaaatgggcaattaacttgaatggtcattattgtcaatgcggaaggtattctgcgcttcactatccatgttcacatattattgcagcttgtggttacgtgagcctgaactactaccaatatataaatgttgtttatacaaatgagcacatcttacaagcttactccccacaatggtggcctcttgagaatgaagtggctattcctccttctaatgatgcatggacacttatccctgacccaactacaattcgtgcgacaggtcgtccaaaatcaacaaggat

SEQ ID NO: 302432 - DNA, 458 bp, Glycine max
tagacagtgtgtcattggtcatttcatcctctctaattttcttattgttgtcccctctattattgatacaaatagtacaacgaattgcaaaaattgtagatcactcctttgctttgatgtgctctccctcgagatattaagcaaaaaaaagacaacaccatggttcaccaatgcttcaacaaccctaaattgtgtaaagagaagtgccagcagtggcaacaatttatcaatttatagctccaaaatttccaattgtgtttgtctgaattaagagctgacattgagaaaatagcctcagttgcattgatatttgcctatatttatttctatccacctctttttaacaaatgtttccatcagtattataacgccgcttatccattgattcatcgaagttcaagtatatccaatgcattaataatttggaaactatattagtgaattatacagaataccac

SEQ ID NO: 302433 - DNA, 348 bp, Glycine max
agctttgtgtaatcgattacactaatttggtaatcgattaccagtgactgtttcggaataaatcaaaagatgtaactcttcaaaaggtttttgaatttttcaaattggttttaagtttttctaaaagttataactcttctaaatggtcttcttgaccagacatgaagagtctatataagcaaggcttttttttgcatctcaagtatcttgaatacttttccaatcaattctttgcaagccttgaatctctttgaacttcttcttcttcattgtaccaaaagctttctgaagttttctggttttccaaaccttgaaaacttgtgctattcatctttccattctcttctg

SEQ ID NO: 302434 - DNA, 422 bp, Glycine max
cttgttcgtgaactccaatcgagacatttgagcttgtacattctgaatcgcctctgcattgtgcttgacatcagcactgagctccttcattcgcgtgttatctgccatggcatgatgaaagcaccaatgaaaggaaaatacaagaaattatagaatgtactcattttgttcccgtactaaaaatgagaatcaacctctaagagtacagtgtgtacaattagaaggactgagtacaatactcacaaagagaaaaagaagaagaacaagacatgttcactcataactaccctctcactacaccacctcctacctctaaataccactattagttggttacataatccaccaacctagagttagggtttctctctctcacactctttctgttaccatagtggatacgtgagatttgcaaatattcc

SEQ ID NO: 302435 - DNA, 382 bp, Glycine max
  unsure (1)..(382): unsure at all n locations
ttcttcttttgtttcgtcttcctgcagctcgctgatattttcacgaagcctctatctccagctctctttcaaggtctctgttccaagctgggaatgatgaacatccattcctagcttgcggngggctctcaacaatagcttgttagttagaaaaagctgttagagttagttttctttctggtgtaactaactaaccaccctttttctctttccttcatatgtgtataaatatcttacgaattcagtaataaagacatgcaattatttggtcatctcacgtacacttgcgtcgtttctctctcctttatggctgttgatccatttaatatttgttccgtgctttcccctggacgacgttntcgagtagagaaatgatgcattt

SEQ ID NO: 302436 - DNA, 385 bp, Glycine max
tgacatgtgtccaatttgttggttattcgggcatttcttcatcacacttccacctctattggctgctccacgtatccctcaatgtgtcttctttttcagccttcatcccgagccttcttgctttctgttttatctttccatctctctctctctcgagctttctagagaagtctctgtatttcttcgatgctttgcctctctatttcttcaactaagtcctaatgtaagatgcgtgtggttcttgagactcgaggtgatagaattgatctctatgactgcaaagccgggttctctttcattcatgggaacgactcattcgatgttttcattcggcgtgagataaacgctgtgtttttggctctggcagtttgcttttgtactaccc

SEQ ID NO: 302437 - DNA, 320 bp, Glycine max
  unsure (1)..(320): unsure at all n locations
gagaaacccatgttgtgactggcattcctgtacggccaaatttcccaccaacccaaccatatctttactcagcccataacaaactttctccttacccaccacccagttatgcacaaaggccatccctaaatctaccacaaagtctgtctaccgcacttncaatgacgaacaccacctttagcacaaaccaacaacaccaaccaagaaagtgaattttgcagcgagaaagcttgagaattcaccccattccagtgtctatgctgattgctccatattacttgatattcatggtaccataccctagccaggtcatcacctca

SEQ ID NO: 302438 - DNA, 455 bp, Glycine max
  unsure (1)..(455): unsure at all n locations
tctccctctnttccctataaatagggagaggagggaagatcaaatacgttcaaccctcctggtatctgaggatcacttgaaattagtgaaaaaaatcattcccgtgaagaaaatccaagccgaggcgcttccgtaacacttccgaaacgtttccgtgaagattttccgccgtctttcgttcattcttcgtcgttcttcggtcttcaatcggtaagttctcgatatcgaacttttcaattcattgtatgtacccttggtggtcctcacttgtttcgcgtacttttattttcatttcgtttactttccgtacccccttttgacgtgctttagtcatttatttaagtcattttctcgcctaatcaaaaaaattaaataaatttccaccgatcattcgaattgaacatccgttaattccggtaaaatgaaatccgactgttcggtcatgccgtaccacg

SEQ ID NO: 302439 - DNA, 413 bp, Glycine max
  unsure (1)..(413): unsure at all n locations
agctttaataattgaattaaaaacgttcagaaattgctggtaatcgattaccatatatgtgtaatcgattacacagtgtaaattttgaattcaaattttaatagcttgtgtaaattagttttggacactggtaatcgattacatcctctggtaatcgattaccagagagtaaatttgttgaaaaatactttttaacttaaaattcttggccaaaccttttgctacttcaatnggaattcccttcctatttaatataccctttctaagactctaaagactgtcttgatcatccatcttgaatatctnntaattctttgtcttgaataaagctttgagacgcatgtgatcctttggcatcatcaaaacatcagcttgatcctttgtctacacatatcttgtggatcagttctagt

SEQ ID NO: 302440 - DNA, 463 bp, Glycine max
  unsure (1)..(463): unsure at all n locations
ccacatcaattagaccttgcaccttatgcttcaaggtcctacaatgcttaatggaatgccctgnggctcctccatgataagcacatgttgtatttgagtcgtatcctcgaaaaaattgaggtcgaggaaccttggggggttatggctaccattgaattatggagtagacataagagcaaggtagcataggacaccaaaattggggagaattctataaacttttttgctggaaaactccttccttggttggtgttttggtttgtgctaaaagtggtgtttggcattggttgtgtggcacgcaagctttgtggctgatttagtgatggccttcgtggatgattgngtggtgggtaatgaaaagggctaacgtcggctgagtaatgacattgttgagcangtagaanatttggcatgtangaatggcagcaaaacatgggttccttccgccttctcattctctcta

SEQ ID NO: 302441 - DNA, 442 bp, Glycine max
  unsure (1)..(442): unsure at all n locations
agcttattgtgtaaactctcattgtttgattaaagtactttgtctatcaaatatttactatttgtgaaagccaggagtgacttggtgataaagaatacttgggtcttaatcgcatggaaagattaagtgtaatgctaggagtgaccatgagaatactcattgtagtcagaagtggcatagaaaatacttggttgtgatcaaatatttgatcaggggaaccctaacaggtttaaaggagaactggacgtacctaaagagttgggacgaaccaatatacaaccggtgtgttttcattaatggtactatatataacttgtcctttgctttaagtcactctcacactatcatatccaagctttgcagactgattgtttcaacacacatcanatcctttggatgaaatccttggtccattgatatctgctctaagaaaagtctttat

SEQ ID NO: 302442 - DNA, 421 bp, Glycine max
cgcaaatgaccccttcatgctttaattaagcccctggtagctaccaagggttgataaccccgattgacgccaaaatatagggctagacttcctaagagcgactaccataaacgccacaattatggctaggagctttagaatccttgagacttaccatgggattataacccctgctattaccaaagttggagtttttataaaaaattactatttaagatatatgaaactttttttaacttatctaacagatatttcagacactagtatatctatattctctggttaaatttgtcatgaattgcttctttcactgctagtagcagtaacaggatagctctggaattaaacgtgatcaatgagcatgtattacaatatcaaaatctaatgagcaacataaggtgatgagcgtacgctagctaac

SEQ ID NO: 302443 - DNA, 396 bp, Glycine max
  unsure (1)..(396): unsure at all n locations
agcttctttttttctttcttntttttcacatttgtacagagagaggttnttcaaaatctacaacaaagactaataatcatctaccttatcaaagcaaaacgcactacaacgctgaccctaattttcaaacaaatggtcaagtgcttgtgcagctnttcgtttgaaaagtactaaatcataatacgccagactatcatcaaatgaagtggaaagagaaaatgttaggatttgcctcctgtgctcttaatctccatttagctatatttcttgattntnttttagtaggataggataagtataggtgaataatttttaaaaatatttaacatgattacatatttaatatttgaatcataaacaattgttaaattaaaacaatctcacgtcacatgcttc

SEQ ID NO: 302444 - DNA, 473 bp, Glycine max
  unsure (1)..(473): unsure at all n locations
ntgaagcactcacattgngttgaagcaatggaagaagatctaatgtctattgagagaaacaagacatggagtctcacaaagctaccaacaggaaagaaagccatagcagtaaaatgggtctacaaaactaagttgaatcctagaggagaagtaacaaagttcatagccagactggttgcaaagggatttctgcagaagcaaggtctggattatgatgaagtatttgcccctgttgctangttggaaacagttagacttgtaatagcaatggctagctacaattgctgggaagtacaccaaatggatgtaaaatctgcatttcttaatggctcactagaagaagaagttnttgtcactcaaccaccagggtttgtgatgaaaggtagagaaacagaggtgtacaagctgcataaggccttgtatggtctgaaacaggcttccagagcttggaacaagagaatagatacctttct

SEQ ID NO: 302445 - DNA, 450 bp, Glycine max
  unsure (1)..(450): unsure at all n locations
agcttctatggctagaatgatactttnaanaacctaatctanatgaagtctttgacttatcttgtaggtcgtagcttaagatgtgaggatgaaatctaatattagatgttaacaacttttcgaaataatattgatgtccaggtattggtaaaatttaaaaatcaatatgtgtaaagagaaatacgtgtgatttgtggngtgtagtgttaatcttttgagtatctataaaagagggtggactagaaatggaagatacaaatttcatcctacatctttaattgacctttcacattanaatggtgattctgacgtgacacttctatagaccgttgagaatgtacttatggaaatgtgataaatgatgtgaacaataaaacaatggtcgattagaaatttaattaagacnatagttttgtcctatattactaattgatcatgtccaatcaaatg

SEQ ID NO: 302446 - DNA, 473 bp, Glycine max
  unsure (1)..(473): unsure at all n locations
tgtggactataccttcggccaaacactgccgtgtttctgtctcgacccggatttaaggcgggctgcagcaccggctccgcttccctaactgtactggaagcggntgtcgtggctttatcctctatagttttctggagttttaacatgacctccgagatggaagccatttgatcttttaaggccgatagattgaccttcatctgttcctgcacgccctcttcattatccattnttctggatcgagtgttatagggatgccttggtgttttcttagttatgatgaaattcctaaagaaataaacaaaggtgagtatgccaccaaaacatgaatatgcaaatgaatgatcggagcacttggatccaccccaagggtttttagataacgtgatgagttcagaaattctcattntatacaaagaccaatgctttcatctagccacagatatacaaagggtgtacaagagaacctaacg

SEQ ID NO: 302447 - DNA, 216 bp, Glycine max
  unsure (1)..(216): unsure at all n locations
ttctccttacgcatctgtgcggtatttcacaccgcatatggtgcactctcagtacaatctgctctgatgccgcatagttaagccagccccgacacccgccaacacccgctgacgcgaaccccttgcggncgcatcgaatataaactcccatactgtctgctataccaagtactacccgtgagctcggactccactcgtcattccacggactaaacg

SEQ ID NO: 302448 - DNA, 411 bp, Glycine max
  unsure (1)..(411): unsure at all n locations
agcttctcatggaagttttctcaagaaagcttctcaaggaagctacctagtctataaatagaagcatgtgtaacacttgttgtaactttgatgaatgagagtcttgtgagacacaactcaaagttcaacttctctccctttttttcttccttcaatttcgtgctcccccctctctctttctctccctctttcttttcctccattgaagcatccttccaagcttcttatccaaggctcatcttggtggtgaagctccttcttccatggcttattccctagtggatggcgcctcctcntccctcttctnctttgtcttccgctgcatctccatggtggaaaaccaccattaaaggacctcattgaagctcanagatccagcctccataganagctcacaagcaagcttccatc

SEQ ID NO: 302449 - DNA, 469 bp, Glycine max
  unsure (1)..(469): unsure at all n locations
tgcttgtgaagcttctatggtggctgaatctttgagtcttaatgaggtcctttaatggtgattctccaccatggagatgtagcggaagacacatgagaagaggtgagaggaggtgccatccactaaggaataagccatggaagaaggaacttcaccaccaagatgagccttagataagaagcttggagatgatgcttcaatggaggaaaagaaagaaggagagaaagagagagggaggagcaagacattgaaggaagaaaaagggtgagaagttgaactttgagttgtgtctcacaagactctcattcatcanagttacaataagtgttacacatgtttctatntatagactacgtagcttccttgagaagctntcttgagaaaacttccttaagaagcttctttgagaaaatntccttgggaagctagagcttagctacacacacccctctcataactaagctcacct

SEQ ID NO: 302450 - DNA, 433 bp, Glycine max
  unsure (1)..(433): unsure at all n locations
agctntaagttaattcaaatgacaataacttttgactcggatgtccgattgagtcatttaataattcttgacgctagaaattgaatacagaagctctcaccanatttaaatgacaataactttttactcagaagtctgattgtgtcccgtaatatatctagatgctcaaaattgaaaacagaagctctgagcaaattcaaacgacaatagcttttgactcggatatccgattgagtcatttaataattcgagacgctcanaattgaatacagaagctctaagcanattcaaatgacaataactnttgactcgaatgtccgattgagtcattntataattcgagacgctcaanattgaatgcaggagctctcaccannattaaatgacaataactntntactcagaagtctaatggtgtcctgtaatntatcta

SEQ ID NO: 302451 - DNA, 441 bp, Glycine max
  unsure (1)..(441): unsure at all n locations
tttgttttcaattntgagcgtgtagatatattacgtcttgaattattaaatgactcaatcggacatccgagttaaaagttattgtcgtttgaatttgcttagagttactgttctcaatttcgtgcgtctcgatatactacaggactcaatcggactttccagcaaaaagttattgtcatttgaatttgttgagagcttctatattcaatttcgagcgtcttgaattattaagggagtaaattcgacatccgagtcaaaattttttattgtttcaatttgctgagagctggtgtattcaatttcgagcgtctcgaattattaaatggttcaatcggatatcanagtcaaaagctattgtcgtttgaatttgcttagagcttctgttttcaattctgagcgtctcgatatattaccggactcaatcagacatccgagtataaa

SEQ ID NO: 302452 - DNA, 391 bp, Glycine max
  unsure (1)..(391): unsure at all n locations
agcttggctttggtttagacatgtttgatacatgatttgggacttgtaggatttgatttgagcaagattggatgaggggaagtgtgattttcgaaatctgcacttatgcagaattttgctgtcaaaatatgtgcagcaggattntagcttggtgcagaaaatgcttgtgtgtggttggctgtggaaagagtagtacagaatgagttctggatgtttgctagtagatcccaacggtcacaatgtacgcttatgcactatagacttccagtataattttggagtcgatccaacggttaacgaattggatcgaagggattggtactgtggtctttaagtgagaaaagctgtaattntggttgatgtgttgagcagagttttctgcctttgctct

SEQ ID NO: 302453 - DNA, 397 bp, Glycine max
ggacctataaaactcaactatggaacttgctcttaacacaagtctgttgttctttgactgctgacagctagagacttttctttcttacgtgcttcgacttgttaaagttcatgttcatgaacttaacagtaccaattaattctttaaaggaaattgagtcaagattctttaaaacccttagtgttgttacttgttaatgtggctccttgtagagcttgtaagccttggatcttcttcatcaatgaagtccttcgcttcttgaagatcaatggccgcggaatggagaataaggaaaggttattggagatgccactttaacgagaagatgagtctcgaacaagctcaccaccataggaagtcatgcataagagcttgaaggtaggagaagatgggtgga

SEQ ID NO: 302454 - DNA, 429 bp, Glycine max
  unsure (1)..(429): unsure at all n locations
agcttccctatttatagaagagtggtgtggcttccttcaagagtgagtggtggatgtcaatcaatgcgttacattcacaatgctccttgtaactctaatcttcactttcctaagtggagtgtgtaagcctcaaggtcaaagaaaccaattacaagcctttggaaagtgcttcacaacttcctatgcatgccttggaatgtgttcctcaatttcctgtgtatttaaatttgtatgtgtcacaacctacccttcggcgggagggcgatgcgagggctcacgggtgcgtcttccatgagaggaaaatgtgcggagtcgccaccaacgtttattcaaggaaaaagttagaanaatcagaaaggtgtggtctacgaactntaagtgtgaaaggtttgngacaacctttaatcaaatgtgcaatatcatgtcttc

SEQ ID NO: 302455 - DNA, 456 bp, Glycine max
tcttagtttcagatgatgcagatgggcttgtagctacctcatgcactcctctaatgactatggcatcatttctggcgctaaactgttgggagttggaagccatcttctcaattaaatttctggcttcagcaggagtcatgtctccaagggctccaccactggcagcatctatcatacttctctccatattgctgagtccttcataaaaatattggagaagaagctgctctgaaatctgatggtgggggcaactggcacatagtttcttaaatctctcctagtactcatacaggctctctccactaagttgtctaatacctgagatatccttcctgatggctgtggtcctggaagcagggaaaattgtttctaagaatactctcttaaggtcatcccagctcgtgatggaccttggagcaaggtaatacaaccagtcctttgccactccctctaatg

SEQ ID NO: 302456 - DNA, 418 bp, Glycine max
  unsure (1)..(418): unsure at all n locations
agcttggagatgatgcttcaatggaggaatagaaagagagaaggggggagcacgaaattgaacgaataaaagagggagagaagctgaactttgaagtgtgtctcataagactttcattcatcaaagtgacaacaagtgttacacatgcttctatttatagactaggtagccttcttgagatgctttcttaagaaaacttccttgagaagcctctttgagaaaactttcttgagaagctagagcttagctacacacacccattcaanaactaagctcacctccttgagaagctatcttgagaagctagagcttagctacacacacccatctaataactaagctcacctccttaagaagctagagctcagctacacacactcatctaaaaactaagctcacctncttgacgaaatacatg

SEQ ID NO: 302457 - DNA, 431 bp, Glycine max
gttaaccttgacttggtagaacctcttgccgatttgatttgttcccatgcttgctaaagtgagacaaaagctggtgcaaatcaaaactccgatatctcatgggtggaatggatgaatgcatgaaggaatgcatataacacagatgcaatctaggaatgcgggggtccggggaattcgtccccttcttagacacaacgtctaggggtagcaaagtgccccaacgtacgtttttaagaaggcgacacggaccctccgttggtttgtttacacaagggatcaagacagaacccatatgcgatgcctatgcaaaagacacaatgcgggaatgtacacagtatgacaatattcactgaacataagcaaaagggtatatgatacttatgcatggcagtgtgaaaaatggcatgcaccgtgtttgctcgtgcccctat

SEQ ID NO: 302458 - DNA, 407 bp, Glycine max
agcttaatggtgcaatcccaatcgaaattggccaacttcataagttgtcaatactgaatttgagctggaattctctgggtggatcaattccatttgagattacaaagttgagcaatattactttcctgaacttgcaaaccaacaatctaagtggttccataccaacatccattgacaacttgaaatttctctttgaactccaactcagggaaaacaaactaagtggtgtgataccaagcatgccggggagtttgcaggtgtcactgaatcttagtagcaaccactttagtggtaatactcccaacaattttggtaatttggatagcctgcaagtcttggatctctcaaataacaaatttcctggtccaattcccaaccaactaactggaatgtcagctctgacatag

SEQ ID NO: 302459 - DNA, 449 bp, Glycine max
  unsure (1)..(449): unsure at all n locations
tgcctgtctgatgcagcagtaatgatggcccgagttatgttgnggaacggttacgaacccggaatgggtttaggcaaagacaacggcggcataactagcctgataaatgccaaaggaaatcgtgggaagtatggtttaagctataagcccactcaggcggatatgaagagaagcaccgcgggaaggaaaagcagtggccaaagctcgcagttgagacaagaaagtgaaggaagcccgccctgccacataagcagaagctttataagcgcaggtttgggagacgaaggtcaagtggtcgcgatatacgaagatgatgttccgagtacattggatttggtacgaaccatgccctctgatttccagctgggaaaatggcgagtggaggaacaccccggcatttacgcaacgagcataatgtaaacctttacggttntaaaagctctatagtt

SEQ ID NO: 302460 - DNA, 412 bp, Glycine max
  unsure (1)..(412): unsure at all n locations
atcttgatttacacacattatcaattttatgaataagaaaatatatttaagctatagtttaatatccaaaattacgattctagtgtcgacaaattatccataacgttttaattgttaaaattacaaaataaaagaactcaaataatagacgtctaatgaattaaaaaaatatataatctcataaaataatcttatgtataattacataacataaaatagtaaaatagtaaaatagtaaaatagatgagactcaacttcttataatgctctttattttcagcaatgaagctaataattattcgaaagatacattgcttggtttgcagctatacttatgctgaataataaatagacgacgtacctcttagcaagtcatctaggcgtacttcttgacatatcatnccatgaatat

SEQ ID NO: 302461 - DNA, 370 bp, Glycine max
tgaaagtgtgtaaaccaccatcttcttatagtataattctggtaacatgtctactatcatcggtatcgcctccctcttcgcattgggggtgctacttgagccgctaaatccctccacctttgggcgtattctttgaaagattcgtgctcctttttgcacacattctatagctgcattctatccggaaccatatcagaattgtactgatattgcctaacgaaggcaaccattacgtccttccaagaatgaactcgggaaggttccaagttagtataccaggtgacaactgtcccagtaagactttcctggaagacatgcatcaataatttttgatctttcgcatatgctcccattttcctacagtacacct

SEQ ID NO: 302462 - DNA, 392 bp, Glycine max
  unsure (1)..(392): unsure at all n locations
agcttctcattgaagcattctantctataactagaagtatgcgtaacacttgtaactttgatgaatgacagtcttgtgagacacaactcaaagttcaacttctctcccttgttcttccttcaatttccggctcccacctctttccttctcctcctctctttttcctccattgaaacatcctctccaagcttcttatccaaggctcatcttggcggtgaaactccttctttcatggcttattccctagtggatgacgcctcctctcacctattctcctatgtcttgcactgcatctacatggtggaagatgctcattaatagacttcattgaagctcatagatccagcctccatagaagcccacatgcaagatccatcatgttcatatgtctc

SEQ ID NO: 302463 - DNA, 405 bp, Glycine max
tctggaggaagcctcttaatgaagcttctagagaaagctacatgatagctttctcggcaaaaacgatgcccagcgttcgttaaccgctggatcttctcaaaatttggtctgcaacttcgcaagacacttttccatgatctgaccgttgggatctttgagaagatgtctggagtgtgctataagcctcttaatgaagcttctggaggaagcctcttaatgaagcttctacagaaagctacatgaagctgccttggtaaaaacgctgcccagccttcgttaaccattggatcttctccacatctggtctgcaacttcacaagacaatcttccatgatcttaacattgggatctttgagaagatatctggagtgtgctagaagctctcgttcccgagagcatctctta

SEQ ID NO: 302464 - DNA, 438 bp, Glycine max
  unsure (1)..(438): unsure at all n locations
agcttctttgttanaacttccttgagaagcttctntgagaaaacttccttgagaagcttctttgagaaaaattccttgagaagctagagcttagctactacacacccctctcataactaagctcacctccttgagaagcttccttaagaagattcctaaagaagctagagcttagctacacatacctctctaatagataagctcaccttcgtgagatgagaagctagagcttacctacacacccnctataatagctaagttcacccncatgacaaaatacatgaaaatacanaaaanaatccctactacaaagactactcanaatgcctcgaaatacaaggctaanaccctatactactagaatgggcaaaatacaaggcccaaacgaaggaaaacctattcaatattaccaagataagcgagctctacttagccatg

SEQ ID NO: 302465 - DNA, 475 bp, Glycine max
  unsure (1)..(475): unsure at all n locations
ctaagcttacatcaaccacttcgggtactgacctacttttatggtcttgatggggcctatgcaagttgaaagccttggaggaaagaggtatgcctatgttgttgtggatgatttctccagatttacctgngtcaactttatcagagaaaaatcagacacctttgaagtattcaaagagttgagtctaagacttcaaagagaaaaagactgtgtcatcaagagaattacgagtgatcatggcagagagtttgaaaacagcaagtttactgaattctgcacatctgaaggcatcactcatgagttctctgcagccattacaccacaacaaaatggcatagttganaggaacaacaggactctgcaagacgctgctanggtcatgcttcatgccaaagaacttccctataatctctgggctgaagccatgaacacagcatgctacatccacaacagagtcacacttagaagagggact

SEQ ID NO: 302466 - DNA, 441 bp, Glycine max
agcttgttatattgccgctgaagattatcatgagaggaaaccaaatgcttgtcgtttgatgtctgggaaggcattaccaatatcaacgtatcataagtggttggatagattgacgtctgatgttgtgtgttaaattccttatgttgaccaccgtgcaataagagaatttgagttgatctctttatttttcaaacatattagatgaagtccatcaattgtcatacaccaacctaagagggttgtgctacagtttgggtatgtttagaccattcctccacaccctgctactccatccctatgtatagaagatattgatgatagatgtattcagttctctgaataccttgcactggtgggtcaaatatgtgttacgcatagacagaatgcagcatactacatggagtgatcttacatgatatctcatcccttcatgagttcaca

SEQ ID NO: 302467 - DNA, 412 bp, Glycine max
  unsure (1)..(412): unsure at all n locations
ntgaggaagttccaactctgaagaaacaaaccttcttttgccattntgagggagctcaggatgaggaagagaaggaacaatcccctcaaggtgaggaacaagtgtcgaaagcggtcccttttaagaagccactggactatggctctttttatgaaacctcaaaacacttttctatgaaagagaagaacgatgaggaataccattttgagcctcaaaatgaggtactatcagtcgatgaatgtggtcaatctgctcagaattaagaagctgaagatcataacacaagagcttaaaatgctagatattagaatgaatacattcacccctatgagggtgtaaaggctgttaaagctcataagactatgggttctgaacctatacaagaggatgcaaatgtgaagatcattctaat

SEQ ID NO: 302468 - DNA, 445 bp, Glycine max
  unsure (1)..(445): unsure at all n locations
agcttagcgtgacaactctntntgaaccttcataattttctcccttttacctgannatgaagtgaaatttacattaaattcaataagaaggcttctattgagcacaaatgaaaactaaaatagaaatatttacaatcctaccaaaaattaaccataaattgggagatttatttacattntggaaacttttctatacaaaaaattagtcataaaagatgactaacaccacctgtgatcgattaaataatcaatgtaatcgattgtttcgaagaattaatcaattattntatcatttcaatctatcanagtgttattcccaacatctagaaagctctcaagaacaaagtaatcgattagattcttgatgtaatcgattaaagtgttcttgatcactnttgggaacactnntaagaacaaagtaatcgattaggatcacctggtaatc

SEQ ID NO: 302469 - DNA, 446 bp, Glycine max
  unsure (1)..(446): unsure at all n locations
tncatcaatttatctcttatttcagcctctgttgaagtgtcatcttcattcaccaatctggataggtggtccgctaccacaatttcagaacctttcttgcccttgatgactaaatcaaattcttgaagcagcagtatccatctgatcaatcgtggcttggaatcaactttgcataacaaatattttattgctgcgtgatcagagtaaatcactatctttgatcccaccagataagatcaaaatttctcaagtgcaaacacaattgtcagtaattctttctcaatggtggcatagttaatctgagcatcattcaaaactctgctagcgtaatagatgcgatgaaacattctgctcttctgctgccccagcacagcacctactgcataatcagttgcatcacacatcaattcaaactcttgtcgctagtctggtgctgtaatcacaag

SEQ ID NO: 302470 - DNA, 289 bp, Glycine max
  unsure (1)..(289): unsure at all n locations
agcttncattcttggttattattgtcttcaatctaaagaagtctttcacattcgacattcaagttctcgatgataagaatgtcatacgacgatttcgagcttcagatttctcagcgtgtaactctgcccatgtctgcgtgtctgattattatgaacacaacttcagatgtttatctgcttctggggtttttatgtgcatgagtgctcgctcctacccaatatccagagcctcgactttctgactaggaacattttggcatgattcttatttttaggtcattgtattcta

SEQ ID NO: 302471 - DNA, 465 bp, Glycine max
  unsure (1)..(465): unsure at all n locations
aagtcttcctaanaatattttgctagtatttatatgtttcacagggggggaaatccacttgattcaaactggacaaagcaaataattttcttggcatacatccttatgctcatttatcaacaaccccatgagagaagaatgagtcttctctatctcattttggctgtaactcatctcatctatgtaacgactcgccctttctacatgttcattagaaaactgatataaccaaaaactttattttacctcatgtacaactctccacatcaattcatttatgaacacacatatgacattttcacatttaacaaaccatcatctaaaacctcacaacttcaacgtaatgcatctatacactaatatcaactgaatagagccatgtattctgggcactacaacatgttatcataagatacaacatcatcagcactaaacacccaactatttagaactatatacacactc

SEQ ID NO: 302472 - DNA, 373 bp, Glycine max
ccttgacccaagagagaatgtcaatccttaccctctgaccaaaaaagaataaatgcgaaattccactcatataacaagagaaagaaaacttccaatgatagctaacaatagacaagaagggaacttcccctatcatagactgggagaaagcacatagaaaacaaccgaaatgtccagtcaagaatggcaaaagtcaaaaggaataagataacgaaaaaagctctgacaaggatcaatgataacagaaaaatgtcataaggtcttgaccgacatatctgaacaatcaaatgcacctatgacaaaagaagaaggcccacacctaaaggctttccttgatacaacaaatccggcgctacactttcgccgcataaaa

SEQ ID NO: 302473 - DNA, 578 bp, Glycine max
  unsure (1)..(578): unsure at all n locations
ccaccccccccccttatctcgncgtacnatacagctantctctctcctacacccnccccccccgcgcgtcggttgancttganaccctcgaaactccgaantaannaaatccannnacaanaacagagcaaacnnnaaatttatggggtatttgcgatgagagaccgcgctatagcgtatatataccatcatgtacctcgactttaggaaattaaatcgtcaccatcaaaaagggggagattgtccaagcaacaacttcgatgttttgatgatgccaaaggaccatgtgcttctaaagctcaattcaaaacgatcatgcgcttatcaagtctaatctcagaccaaaaaccatgaaattcaagagacatgaccaagatcaactctacagacgtatgaatggacactccagttgaaacagcaaaccgtctggccaaagaatataagttaacacgtctttacaagagacttactctctgcgaatcgactgctagacgattaaatcgaccaccactgcgccaaaacgaattcgaactatctatagcagctattacacatctgaattcaatctacaatgcgcc

SEQ ID NO: 302474 - DNA, 427 bp, Glycine max
  unsure (1)..(427): unsure at all n locations
atctagagtttgtgtgtgcgagngannnctctcacacgctttagaattcaatgtgttattgttaatcataccgtatatgtgtccatgctgaaggatgttcgttctcttacagttaatatattcattccccaacgtatatactctattagttcttacccgttgcttaagatcaaaaccactaaatgaanatattgtaattgactctagggtatgcaaaaaaatcatgtcggaaagagaatattcactgtgagtttactcatagtctctaacacatagttgtcactgctctaagcaagaacaacttcatatcaatatgatgttaaaatacaatcgaagatacacacgcatgtgctgattgtaccaataaccactctcaatnctaactaatgcacgagctgatactatcgactataaatctttacccgat

SEQ ID NO: 302475 - DNA, 343 bp, Glycine max
tacttcatcatacatgactcatgtcagcactcgtgttgtacgtataatgccaggcccgctaatatagcagcgtgtgaataaagcggaaccttttatcttacttttacttttaaacaagtgggtagcctttccaaaagtaacagtgaatactacaatataccagctctaaactactaatctctatgttctgcatggaaactcatgctactgcaatatgatcagtggtcaaaattatataccatactatgacaaattcatcatccgaccacaatcgatgtcatcgacagtgcgtgatacacatcagggattctattattgaaatatacaacaattggtaacaaaa

SEQ ID NO: 302476 - DNA, 434 bp, Glycine max
  unsure (1)..(434): unsure at all n locations
atcttgtgttatcaatggaatccaagattccatttgacataagtcgttcaattntgttcttagaaaggtgacctaagcacttgtgtcataatgctcctgagtttatattatcaattctacgcttagtaccacacaattctgcattaaaggattcaccatangaagctacagtatcaagtaaatatcaattatcattagccaagagtgaactggttccaacaatatctgaattgaaagacaacctaaatacattgtttccaaatgaacataagtaacccaatttgttcaaataagaaactgaaaccaaattccatctaaatgacagtacaacaaaagtgtctttcanagtaagaaacactgatgttagtagtggcaccagaatctaaccaccaagtgtttctaggtactggagctaaattgacctcagaacagac

SEQ ID NO: 302477 - DNA, 443 bp, Glycine max
  unsure (1)..(443): unsure at all n locations
taccttgaagacaagttgtagggcacgacttctctgaataggaaaactccgtggcttgcgcggtggcgcgacaagacgagacgccgaacgcgcaacaatgcactacgcccttcggccgaggtcgcggnggtgcgacggagatgcatgcaaacggaagaggtcacagcaaggtcacggtagatcgaaattntagagaaacggggaagcgggagctcgagtgcgagtgttcatgaattagcacgaaaaaccttataaacctcaatgttaacgatgatggctcaagaaaaacgtccttgacattcaaaatttcaacgacggtgttttcaaatacactgtcttaacttacctgctgcacaacctacaaagacagacaccccggtcaacgttgttaaatgtgtcacgtgccatgcacatggcacataaaatggtgacatatttacgga

SEQ ID NO: 302478 - DNA, 431 bp, Glycine max
  unsure (1)..(431): unsure at all n locations
ttcttgaatttgcgttctccaccattttttcatagtaaaacactggtaatatgtctactattattgtgatcatctctttctccgtcattggagatgccacttgagctgccaggtctcttcacctttgggtgtattctttgaaagatttgtgcccctttttgcacatgttctgtagttgcatcctatccggagccatatcaggattgcactgatactgcctaacgaaggcaaccattaggtccttccaataatggactcgggaaggttccaagttagtgtaccangtagcagctaccctagtaagactntcttggaataaatgtatcaatagttcctcatcttttgtgtatgctcccatcttccgacaatacatctntagatggttcttggggcaagtagtccacttgtacttgtcanagtctggcacattg

SEQ ID NO: 302479 - DNA, 458 bp, Glycine max
  unsure (1)..(458): unsure at all n locations
cattaagaggcttcctctanaagcttccttgtggcttctttgttaagctctctcaacaggcttctttgagaagctagatccttatctatccacacccctctattaactaaattaacttccttaaaaataattacggatgaaaataacgcaacaaataatcaaacatcaaacataattactaataatatatagatatatatatcaaggtgttacagtccccggacgaaattagggtatgacatatcctctggtcattgattaccaaagagaaaataccatatatttgaaatcacaaaattnttttataaaatatcctttggctaaacctgtgcattgtttgtcggtgaatacgattaacttttgtgtataaaaattgtataaattatatcaacctctcccaatctatgcgtattttgtagtgttataagtattttatgctaagcatacgtaataaatac

SEQ ID NO: 302480 - DNA, 329 bp, Glycine max
ttcttatcttgatcatcttaactcgatgtatggcaagtctccatgtggggttagctgaaacatggatgctatggtggcaagcacattacccatctgattttcctctctacgaatgtggtggaaagagacctcatcaagaactcaatcagtttcttgatgtacgcctgatagggtatcaactagagatccctagtttcccattctcccctcagctggcgaattaccaaggctgagtctctgtacactataagcaatatgacattaaagtcaattgccacttggattccgacggcacatgcctcatactcagccatagtattcgtgcaatc

SEQ ID NO: 302481 - DNA, 444 bp, Glycine max
ttaaaatctgaattaaaaagtccaataactgttggctttctataaccatatatgtgtaatcgattacacaatgcacattttgaattcaaatcttaatagctgttgtaaatcatttttggccactggtaatcgattacatcctctggtaatcgattaccatagagtaaatctcttgaaaaagactttttaacttgcatctcttggccaaaccttttgctacttcaattaagaattcccttcctatttaatatacccttcctaagactctagagactgtcttgatcatccatcttgaatatctttaattactttgtcttgaataaagctttgagaagcatgtgatccttctgcgtcatgaaaacattcaccttgatcctttgtctacaatctccgcctgtgcgatgatgacaatacttgaaataagacaagctatatacaatatga

SEQ ID NO: 302482 - DNA, 253 bp, Glycine max
  unsure (1)..(253): unsure at all n locations
atgcttaatttaggacncaaagacctttcaagctgagatgaactgactaatgcctccatgtgccacagaatccagacataaactatcatctcttaacgcctcactcttattatcatcatcacaccacatattaactttctcaccgtaggtgaactctacatagcatctctcacagttgtccatgggctattcctgcttataaacatctctaacatgatcacataaaccctaaacaaaatgggatgtctactca

SEQ ID NO: 302483 - DNA, 489 bp, Glycine max
  unsure (1)..(489): unsure at all n locations
ncgccgcccgcgtgagncttatttgatacctttgaattccgcgacctatgaatactcagctcgtccctcgtcgggactatgtttccacttgctaatctcaaccaccgcaatgacatattacacatttgacgcatgatacagtgcaaaactccttagaatgctagtaattgaaatcatctgggcataggatggaattactctattgagtgcgacatgcctgatgaccatagtgaatgtatgaatacatgcattctgacgatgccacacaataatctaacaaagtctgcttctttactacctccctaagagtccatgatacgctcgctacatattaatacccgatgcttatcaatcctcattgatcaggatctatcaagatctgcatatcctcaatacaaggtgtcatagctctacgctctgtaatcataccatgttggcactgatacccctgcagttttataataaattacagtgctttacatcattacg

SEQ ID NO: 302484 - DNA, 427 bp, Glycine max
  unsure (1)..(427): unsure at all n locations
ttcttggttcgctatccgcagactcaacagaagtcagttgggaaagaaatcagactatgtgcacgaatcttatacccagtgggttattgataggaccaagagctttggcctaccctaccgcttacccagatacctatcgtccaccatcccaccatcatccttgcctatcccctttgatactaaggaagagtttcatgaacaattaaccaaagaaaggcaagagaaagaaacttggaagaggagataccaggagctcgagcaagagaatgagattttgaaggggaagatagcccaacagagccgtgagctntttatccagaaccagaggatgattgagaaggacgacttgcttcgtcgganagacgctttgctccaccgagatgctagaagaaagaggaggtttatggatctgttctcccgtgcacat

SEQ ID NO: 302485 - DNA, 442 bp, Glycine max
  unsure (1)..(442): unsure at all n locations
ntacgtatgaactattaccctccttgcagcacacatgtgctagtacttggtttgagtccatagtctgacttaagtattatctgttaggaattttataattcctaattaattaatatgagttacatattatattataatatttatattagttatttgatatgtttgatataattcaatgagcggaaaccagttggtccattaggagataatgagaaccctaataggttaaaaccttggttattgttcccaatacatcaaatcaagaaacagtttttcctcttcccatctaaagagaaaacatagatcccataagaaagaaggtgatttggttgaggaaagtcattaaactaattgttcatgattgctgtaagattccgctgcgtattaatcaagctctgtggacccagatattccttaaaacctcttgatgatctgacctaat

SEQ ID NO: 302486 - DNA, 436 bp, Glycine max
  unsure (1)..(436): unsure at all n locations
tgcaggctctcacggnatgtacgcgaagatctagggtcaatggtgcaatatcatattgcgttacacaacacctaagaaaactgtgaccacctaattcattctactctattccacaagacgtatttataagatactgctaagtgccaatcatagatactcgcatctctgcataatacgtgttgttgagtataggaaccatgcttccttggttcatgctgattcttaagtagaatcgtctatcatatatactatatgaatatgaattcactatatgaatgctcaagttttatctctcataaaatactaatctgatcgatatcacatctcacttcattcagtctctacaatctagatatacttctggatcctatgtacataagctactactaaatcataactagccactccgtattgtggaagcgatctctaccttaac

SEQ ID NO: 302487 - DNA, 393 bp, Glycine max
  unsure (1)..(393): unsure at all n locations
tctangcgatggctctgtaagaactccactaccctagttagacgtgtgtttcatcagnccaagcatgactactgcctattcaccattagatcatggaataacttagtcattctactaatgcatatcgatgacatgatcctgtcaggaccaaattctagactagggcaagctagtgagacccaattcaatctatgtctcaattgaggatccttggcactatgaaatattatcttggcttataattatctaaatgcaacagaggtatctcactttcctagagaatatacactctatctcttttggaagatacatgtttattgacatgcaaaccgatcaatctatcgatggatcccagactagatacttactgcctgataaatcaatcttgatgat

SEQ ID NO: 302488 - DNA, 373 bp, Glycine max
  unsure (1)..(373): unsure at all n locations
agctntacattagatnttagtaatgacccactaacctagaattaanataacttaatgccattaacctanggaattaaaacaaacttaatggctgagtgtaactgaaattgttggcaaccaaaagtcacccccaacagccaacaagtcagccaccatttggtctcccaaaaggctgatgcctaagttgccaattgggcccttattacaacttgaactanagcccttttagttgattaacccanaacatatttttggtcagccaactttacaaggatngggccattatntagacaaactaaacactctaaaattgaaataaagtggtgtcatttagtccttcattngggccatgatacaactcacaaccttggac

SEQ ID NO: 302489 - DNA, 455 bp, Glycine max
  unsure (1)..(455): unsure at all n locations
tggtcataacgtttcactcggatgtcggattcaagcgcataatatatcgagacgctcgaaattgaacaatggaagctctcgagcaattccaatggtcataacttttaactcggaggtccgattcaggcgcataatatctcgagacgttcgaaattgaacaatggaagctctcgagcaattcaaatggtcataacttttcactcggaggtccgattcaggcacataatatatcgagacgctcgaaattgaacaatggaagctcttgagcaattcanatggtcataactnttcactcggaggtcngattcangcgcataatatatcgagacgctcgaaattgaacaatggaagctctttagcaattcaaatggtcataacttttcactcggatgtccgattcacgcacataatatatcgagacgctggcaattgaacaacggaacgtctcgagaaat

SEQ ID NO: 302490 - DNA, 446 bp, Glycine max
  unsure (1)..(446): unsure at all n locations
agcttgaatatgatgttttaatggatganaagaaagagagaaggggggagcacgaaattgaaggaataaaagagggagagaagtggaactttgaagtgtgtctcataagactttcattcattaaagttacaagaagtgttacacatgcttctatttatagactaggtagcttccttgagaagttttcttaagaaaacttccttgagaagcttctttgagaaaacttccttcagaagctagagcttagctacacacacccatctaaaaactaagctcacctccttgagaagcttccttgagaagctagagcttagctacacacacccctctaataactaagctcacctccttgagaagagaagctagagcttagctacacactcctataatagctcagctcacccncatgacanaatccatganaatacaaaananagccatactac

SEQ ID NO: 302491 - DNA, 474 bp, Glycine max
  unsure (1)..(474): unsure at all n locations
tatganaaggtttagccaaagactgtattntcatttgtctatggtccaatgagttacttcacatataaaggaaaaggaaaatatctgaatggaaacatcattgaaacatgtttagaagtattaataagatattttcactgctagatcagcagacctaactaatgacatgattttcttgttacttgtttcacgctgaatttgaagttgtatcaaagtcatgacttattagtcagtataatgctataaaatctgcaataaattaaaactattatggtttataactatttgaggctttctctcagtcatccaatcttgttgaacctaataggatgactatgccctgatgggagaaaaaaaggcgaagaanacaaacagatgaacttttcaggtacaaccattaatctatgtgaatatcanagtaaaataatagatacacttatgagttntgtggcctcagttaatagataaacatag

SEQ ID NO: 302492 - DNA, 434 bp, Glycine max
  unsure (1)..(434): unsure at all n locations
agctttctactctgtcttataacacggaatgagctctaccttagtttgttgctcttcttagtaagttcttaatcaatgcggtggcattgtccgaaggttcttatcaaattattgggtcattttgtccacttggctaaccatataaaagtatcaataagaattgtaatgtggggttccattgtgatgtggtagttgattatgctttacgtggttttgaagcatgacgagagttacacgccgagcatagtttccatccgtgccggtgatggttttcacaacttgaagggtaaattttagtttattggttgcgtttgattgtgatgatcatgcttaattatttggtgttgatntgcgaacattcttacgagattaagaccgtggaactcgtgaagccaactgtgtgggcttatctatccttgtctagagctgatcct

SEQ ID NO: 302493 - DNA, 475 bp, Glycine max
  unsure (1)..(475): unsure at all n locations
tagctacacgcaccctatntaaggatagcctatctatatatataatatatatctgaacatttattacaaaaataagggtaaattataaaagataaagaaagatgacaattacaaataattttttcataacatataatgtattatttggcatagcttaacttgaaaatagatctattaagacaatgaataaaataataaaactgtcaagttgtcaactgattaaagaatagtatattacgttacagtaaaaaaatagtatagtatagtagtagctttcaagtttttaactaaaatattatattttaataattaatataaacgtattaagtgagtaaattgtcacgcgtatgtttgtacataataatatatattacaaatacatgtgtaccagacgctcttagctggcatattgatttaatattgcatcatcacaagcatagagcataaactagcattatggttctctagatgatgt

SEQ ID NO: 302494 - DNA, 330 bp, Glycine max
  unsure (1)..(330): unsure at all n locations
agccngntatcttcaantttgtcnggggggagggacggggggaatatcatccaatgtcatatcttattctgactaaatcggctagattggaaaaattcatcgttctggttcttttaaaggtatttcctttttcatactattgtttagggaagcacagcccaaaatacctagtttaagttcatgatccacctgcggctatttccttccttggcgattgacatctgccaatacaactgtaatatacacatgtgatctttacattcaactgaatctcctcactaccactttgcgcaactacgacatttcttcttctgatatgatacctcacct

SEQ ID NO: 302495 - DNA, 475 bp, Glycine max
  unsure (1)..(475): unsure at all n locations
gaaactaagcttaacccaaatgtttaacacgagacgctaccttgagtgtctcttttactntcgnatncctagaaacaaagaagggtcttaacttttaagagattgtatgagaaagaaaaaagcaaaattatccttaaactatcacgcacatgatgaattatcgttaacaaaaatcaaactatgacagacaagggaatgtcattataatgaaattgtaaaagttatagaatttactatatataacaataatttacaacgagattctcttgtgataagtattaaatgaatgaaagataaatataatttaactctaaaatttaataatctagcaatctggattccctttcttaaggtgggagacatgttggctcttccaccttagctctcattgccaatatataatgtacctgtctggtcatgcatagctaagatacttttcacatctacagtgaagctctccgtatagctttacatc

SEQ ID NO: 302496 - DNA, 304 bp, Glycine max
tatcttatattatatgggacccacgagctcaagaccaacgaagaactgctgaaggtgccattccaactaactactggaaaagatatggacgcatggaaaatttatctgtctttacgatatatgttgtggaattccaagacgatgtgactacgactgaatggaatgcttatgcctttgctgttcattgatgccacctttatctatgtacagcgtgcctaaatcccataatacagtacaatgtgttatgtcaatggaccatacatggattatgttaatagttagaccttcataccttactcatact

SEQ ID NO: 302497 - DNA, 293 bp, Glycine max
ctgaagcatccattatccctagctatcctggatggttgcaaatactgccctaagtactagcgaaacaagaagactgacagggtaacgaagtaccacgtctctcaagagaaataacaagcgttgaagactaaactataaataaaaacattatttcattgtacaaagcatacctttcttggccttctggctaagatcaagtgtagcatctgttcttatcagttgaatatttgatatgtggaccattggctcacacgatattaaattaatcttttgagggggagggtccattatag

SEQ ID NO: 302498 - DNA, 451 bp, Glycine max
  unsure (1)..(451): unsure at all n locations
atcttcatgtttaactatgtatggcaaaacttcattactggtgttcaagatatacaagtgagcttgtaacaaatcttctacacttggagtgatcacctgcagtcctcttgaacccttaccacccactctgtcatcatgccgagactcangaagcccaacaggtttagccttctctaagtattctgaacaaaattcaatggcttcttctgcaatgtacctctcaacaatagatgcttctggatgatatagattctttgtataccctnttaagatcttcatgtatcgctcaaccgggtacatccaccgtagataaacaggaccacaacatttgatttctctgaccagatgcacaatcaagtgaatcatgatgtcaaagaaagcagagggaanatacatctncaactgngcacagttaattgcggcctcattntccaactcatcanacatgact

SEQ ID NO: 302499 - DNA, 450 bp, Glycine max
tagaagggatgaatcaaggatggaaagcatggtgttagaggataagttaaaggcttgtcagaggtcgaagagaagtttgacagaacagctgagcaaaatagaagagaatatgttgataatcattgatcaatataaggagaaggtgaacctagctgctagtcatggacatatgctggaaggtatcggctctgtagattgaaaaggaagcaagagagagggtgatagatttattgcacggcgaagccatgaaatggatgaatagattcgctctcactctgaatgagagtcaagagcttccaaggttgttagccagagccaaggcagtggctaacacatactcgactcccgacaaagtccacggtcttctcgattactgccaacacatggtcaaactaatgaccatataattaggattcgtcgaggcgtctgtgtatttatgctttgactctg

SEQ ID NO: 302500 - DNA, 436 bp, Glycine max
  unsure (1)..(436): unsure at all n locations
ttctntctttattatcctcatatttggaatcttgttgtttttgcatctccttggtccttattgaggtattatgtcattgtgatacttatgtgcttattacatgttttttgatatatcagtattgttttatattaaagttatgtgcattgtgagtgaactttagttttccgtttgagattcaatacaatgattaatatagataatttggacagtttacgaagagtcattttttatacataattcatacttataggttaagtatgttgtgttaaatttgatgaaatttatgtttattgcatatcgctntgttcttcgggtgcacacttgatcatggtgaattcatctcaccgctttcatgtcgtgtacttggagattaatgcgaaatggcttcaaaatttcatcacatntaacaaaacatacttaacttatacgtatg

SEQ ID NO: 302501 - DNA, 446 bp, Glycine max
  unsure (1)..(446): unsure at all n locations
ctagattgctcattagtgaggttgacttgatgagcaatgttgtgggtgagattgattcttcttaaatcggtggtacctctctttatatctgcagttctagcaattgttacattgaatttgaggcttccccttatgtcaacaatctttagacaagtcgtttgtccttttgcatgtagtgcaaggaggaaaattgtcccttgatataaattaggttgaactcccatcttgtttgccttttccttttgatcacctcctcttttacattgttgcttattttgatccttctgaatangttgcttccccttgtgtctagcttgaaatgtaccttcaattacatcatacagcctcatggaaaatcttagttcatgagcatgcaacttactcaccatctcanacatagttagtttcttaagatcacatgattcttcaatagtagaaactttggc

SEQ ID NO: 302502 - DNA, 435 bp, Glycine max
  unsure (1)..(435): unsure at all n locations
agcttagattgacaacaacttttgcaccttcaaatggtctcctttttacctggaattgaagtgaaatttacattaaattcatatggaaagcttctattgagaaaatataaaaactaaacaagaaatatttacaatcctaccaaaaagaaccataaattgggagaaatatatacatttttgaaaacttttctatacaaaagttagtcataaaagacgactaacagtaaggcaatgaaatgggaggaggcttgctatatacaatttcatagggagtagcatangcagaagtatggaaggtggagttgtaccaccatttagctaaagagagctaatgaacccaatgatgaggtctatctaaacacatacaccgaagataagtctccaaacgcctcttaacatcctaagtctgcccatctgtttgtgggtgataagagg

SEQ ID NO: 302503 - DNA, 404 bp, Glycine max
  unsure (1)..(404): unsure at all n locations
tgcaatcgattacacatatactgcaatcgattaccatatcatatcttcagacaatatcctcaacagtcacatgtttttatgtggttcttcgaatgactatcaaaggcctatatatatgtgactcgagacatgaatctgctaacagttcttcagaacacaaacgtcttatcctcttataaagcacaatcgtcttattgctcttacaacattccttggccaaattacttgtgatccaataacgaattttttagcgctcaaattgttcaatctatctctttccagagagatttcttcttctcttcttcattctgaaaagggattaagagacccagggtctcttgttgcgaaagaattctaaacacanatgaagggttgccttatgtgtctacaacttgcaaacgaat

SEQ ID NO: 302504 - DNA, 522 bp, Glycine max
  unsure (1)..(522): unsure at all n locations
ccgcgctgngcttganncactagnacnttcgaaactactnggcgattggacctgggaccctgngaacctcaacagccgacctgcagtcatgcacttcttgtttacgatcggctgagggttgtgacacgactgagcggactgtgtcaatctgagcctcaccattacatggcgacatgaaacaataaccttcactatcctgaatagatcgcgatatcctcactgacaaatagaccgattacaaggcataggaggatgctgaccaactttctatgcatgcatagaaacaggtcgctcaatttgctgagtctctagagcacgatgcggcacgantgacncatatagagtagggatacgctacgtcttactgaagcgatcttcatgatacgtatatgtgccaatatatctccacaatggattcacgaatgcgatctacttagctaagggtttgattgctcacctaaggctaccggactggacagcgatgccaacagacggtacattactggtgttgtctgacgaacn

SEQ ID NO: 302505 - DNA, 264 bp, Glycine max
  unsure (1)..(264): unsure at all n locations
atcataccacgtacgcatagtatcacaaaggtacaactcaggtatgagcttgtatcactacttataaatcaataatatacttttgcgtgaagcatatcatcaaacgttacatgatggagctcgtgtctactaatattcttatggagaaatggaaacttctggtgacatagaatcatatgaggatctatattaangttataaggctgacttggacacaaaatctaaagatgatacacaggctagtcaccgatctatcttttaatc

SEQ ID NO: 302506 - DNA, 371 bp, Glycine max
  unsure (1)..(371): unsure at all n locations
tatctnggagaggatgcttcaatggacgaaaagaaagagagagaggaagagagaggcggggagcacgaaattgaagaaggaaaagggggagagaagttgaactttgagttgtgtctcacaagactctcattcatcaaagttacaacaagtgttacacatgcttctatttatagactatgtagctctcttgagaagctttcttgagaaaacttccttgagaaacttctttgagaaaacgttcttgagaagctagagcttatctacacacacccctcgaataactaagctcaccttcttgagaagcttccttgagaagattcctacactagctagagcttagctacacacactcctctaataactaagttcac

SEQ ID NO: 302507 - DNA, 385 bp, Glycine max
  unsure (1)..(385): unsure at all n locations
tgtagccattagaagaggatgaacatgtgattggaagtatgactganaatgttagtaagtctgtcatattgattgtgaaggaatggatcgaccgtatcccggttagagtgtgatcgttaaattttaagagaaacgactattatttattactgatttttgcatgaatctctgaagtatgaatcgaatgcatgaaattgaggatgatgaatgccatgtttgattgtgatagccacttagccaaaaagttgaccacatgcttgaatgatttatcctttgcacccagtttgagctgaatgaattattgattgattgaaccctgtgcctatacaatgttatctcctgctaccttgacgtacgttgtaagagagcatcatcacatgaagcg

SEQ ID NO: 302508 - DNA, 352 bp, Glycine max
tatcttagctctgaaagaaaagatacgaggaagacaatatctccatttggtttggttggtgaaagttgaaaccttttcacgagctcaagttggtagtaactttcttaactcggcggtctctttttttctacatcgactctcgttgcgttttgcaaagatctgatctgggtcgtggatatttcaatgtgaaagttaaggttctttttgtcgcatagtaataattgaaagaaacaaaacaaggtgggatttttaaagggggtggtggagatggatcgttctgctatgactgttgggccaggaatggatatgccgatcatgcatgacagtgacaggtatgagctggtccgtgata

SEQ ID NO: 302509 - DNA, 417 bp, Glycine max
tcttaaagagtaagagacactctttatcattctctctttgtcaaatgtacttgccgactaagatgtttgtaccataactcatacattgacaatgtttatatttattttattttactaatcacatttacaacagaatgccttgaattgaaatttgatatatagaataaaaacattctttaataatagaattttaattcaataaaatgtattttggaaatgatatcattacataagactaaaattagttaaaatttatttatattttaatctatattgagatcgtttatctttgctctggaaggagtcctatggaaggaagatatagaaacgaatttactttgagattgaagaaatgttgattgtgatttgatgctagtagatattagttcactgatgtctagattctattctaagtga

SEQ ID NO: 302510 - DNA, 434 bp, Glycine max
  unsure (1)..(434): unsure at all n locations
agcttcagaccaaagctattcanaatctaggtatctaanacccctcaatttagtggaatttcaaggtttgagaagtgaaaatgagaatggggtaaatttggagcaaactctcacctcacacaagtctatatcatcaatctaaacttgctcaaactggtttttacgacgaanattctaccgaatcaaaatttgactcctcaacacccaattntaccctagaaatggctcttgccttcactttggtcatttgtttttctctcttgcacaacccaagctntctcataagtcctaaatgacatttcaaactaggattaactccctttaaccttcaaataccactaaatccagaattggccttcaactctanagcctcactctttcactcataacactacatttactnttaacctangtaactctaccttatcctacag

SEQ ID NO: 302511 - DNA, 241 bp, Glycine max
tctttccaaagcctcactcaacgactcgtctggaaattgacgaaaggatgagatggcacctgttccttcagtagtcttggactctgggaagtatcccttcaagaatctttcaaccacttcatcccaagtcttaagactattacctttagatgaatagagccatatttctgcctctacagacaaagaatatgaatacaagctcaatctaatagcatgctcatgcacaccagccagtatgaca

SEQ ID NO: 302512 - DNA, 459 bp, Glycine max
  unsure (1)..(459): unsure at all n locations
agcttcagttttantatgattcacttccaacggagcaggaatctcanagtagagagaanaagataatgcttcgaaaactcattntggcagcacacagaaatgtcaaaatctatgatgaacaaacccaggataatagttaaatttaaaagggttaaattggaggggggaaagactttctgctagattatcaggaaaaggtagagaaagttccatttacaattgttcttttctccatttaataaatagtttaacctcaagaaatattttcaggaattgatgttgaccacaacagcatggaacagattcaaaaaaggcattcanatcatattgaagcaagccattatagtaaataacaaagagaaagaaggctntanggcaaccagaatataccatatagaaatgttcccctgtggcatatgtacaaacataatcccttcagtaattttcaagagctagacg

SEQ ID NO: 302513 - DNA, 457 bp, Glycine max
  unsure (1)..(457): unsure at all n locations
agaaactaagcttgaagcctagagacngaagaatgaagaacacattttgatgttcaaattaacagatttgaattaatgtggtgtgttaaaagtagtgtaattcaaatgtaattgttcaattttgttaagattgtgaaatacattagaggttagccatagtagttggttgttaactaactatggttaagtcttacttagtgtataaatagcatgtaaacccctgcaatacggtggatgatcagtttttcaagcactaataaaattcccatatattcaaaagttgttattcactctttttctcccttgttcaatctttttcaagataccacctagaaatcttgatcctttccaacaagacaaagtcaagactaagccgatgttattagcaacagtccaaagttgtggcaatgtagcattggcttgaggctgatgtanacgtactattgaacttgactaa

SEQ ID NO: 302514 - DNA, 436 bp, Glycine max
  unsure (1)..(436): unsure at all n locations
agcttgccgtcacggagttntccgactatgctcttgtgtggtggaacaagctaaaaaaggagagagcaagaaatgaagagccaatggttgatacatgggcggagatgaaaatgatcatgaggaagcggctagttactcaagggatttgaaatttaagcttcaaaaactaaccacccaaggcaacaatggggttgaggagtatttcaaggaaatggatgtgctcatgattcaagcaaagattgaagaagatgaggaggtaactatggctcgatttcttaatggtttgactaatgatatccgtgatattgttgagctgttggagtttgttgaaatgaatgatttgcttcacaaagcaatccaagtataacaacaattaanaagganaggagtggctaagaggaagtttaccaactttggttcttctagttggaaagac

SEQ ID NO: 302515 - DNA, 476 bp, Glycine max
  unsure (1)..(476): unsure at all n locations
tcatgatgaatcaagattgattcaaggagttntgatgttaacaatgatgatgacaaanagctcanaagtcaagatcacttcatgataacaaagatgatgacattcaagaatgagttcaagattgagtcaagaacacttcaaggatcgagaggaaatttgatttcaagaatcaaaaatcaagattcaagattcaagaataatcaagatcaagattcaagactcaaagattcaagaatcaagagaagacttaatcaagataagtattaaaaagtttttcaaaatattgagtagcacaagaaattttcacaaaatcattaccaaagagttttactttttggtaatcgattaccagattatagtaatcgattaccagtggttntaaaacgttaagattntcanaattcacaatgaagagtcacatctgttgatgtgtaaccaattacaccattatggtaatcgaataccagtgactgttt

SEQ ID NO: 302516 - DNA, 449 bp, Glycine max
  unsure (1)..(449): unsure at all n locations
agcttgcttctgcttgtgtgttgagtgtgcgatgaaatagcatagaggaagtttgtatttatattagttgagggtgattgtcgatccttatttgtagggattgttggagctcggagcttatagataatgttaaagataaacatttgtttatagatgttttacctttgtagataatgtgtgagcttatagataatggtagagataaaaaattgcttatagataatgtgtggggttatagataattaattatttatcaataaataagatattcaaataaatntgaatattaacatgttagagataacatatttgttggagagcccagtactaaggatcatatgtccgtgctcatgtaaccggaacanacatggagggtggacatatatctctgaatgtgtcacatatattntgcggatacaaaacatatgatngaaaagattgactaatag

SEQ ID NO: 302517 - DNA, 472 bp, Glycine max
  unsure (1)..(472): unsure at all n locations
ntgcgggtagataactctagctcagattgtccttcatgtcattatctatatatatttgncatgatttggaaatgttgattagaaaaattgtgtggaatggcatggcggaaatatcttggcaaaagttttgtggccccaagaggaatggcgggttgggatttcgcaacttgcatgaatcgaataaagctttcatcatgaagttggcttgggggctgataaataccccgcatgcgttttgagttacgattcttacagacaagtatggttgcggggagaagagaaatgcttctacaacatggaggagtgtttagagattcaaatgggaatctacgcgcttgtagtgtcttcatgatacaattatcaactatccttatatctcttgatttggcttattacagggaagctccagcagtctcaatcttatgctaataacatcaggaatatattagcttctgatggctggagattggag

SEQ ID NO: 302518 - DNA, 408 bp, Glycine max
  unsure (1)..(408): unsure at all n locations
atcttgtgttaaanattntgatggggtgaaaaaaataaataacatgcaagttaatgaggtaattagcttatgcattcaaccactcaaaacatatataattccatatcatgcaagttaatgtgaataaaataaatagcatattggaagcaagtttcaaaaaaagggaggaatcagaagactctatagtgttacaaactataatataagaaattgttgataaataaactgcaaggggagcaaagtttcagaaaactgcttcacctgcagcttgacatattagtccttttactattaagaagagaanaaaggtaataccaaatttgacaaagttntttaggggcaagaaaaacactanggatagatagtgaattcaaaatagaaaaagtgataattatggctctntatcac

SEQ ID NO: 302519 - DNA, 419 bp, Glycine max
  unsure (1)..(419): unsure at all n locations
tattattatttatacatactaacaataaggtacattaacttggtaaattaaattatcggcgtaaatgtacatcaatataaatataatataataaaatattaacaatgttgttaatggcggaaagccaaaaattcactataaaaatatggcggatgacgtaacagaaaatgacggatgtcatggcgaacaaaaaaaaaatacatatttataaagtcactgaaattgaaaaaaacaatggattgcattcaaataaactaaaaatgtttcatgagttcatacaataatcaattatcaataccaaataaactcattaaagagttcacaataagaaaatgataaaaaataaaaggggtgtcaaatatcaaaaggaaaaaaaagctgcaaacaaaaaaaggggtgtcaaacagcanaaacaaaat

SEQ ID NO: 302520 - DNA, 447 bp, Glycine max
  unsure (1)..(447): unsure at all n locations
atcttgcattgcagtagtacttgtaatagtgactcctcaagttcaacccttcctgcatggctccaacagtacaaaaatgagaataaaggaatcaactataatgatcaggtcttcattattattatcacaatcagacacgttgataagaacatgatggatttcattcttgttatattntattctgtgttatcatgtcatgtttgcattanaattagagaaattcaggctacaaaatttaaggattttgacactattactattactgagaaattctctctctctcttnttggtttttctcctttgtatgtgctcaaactcataattcanaaaanaatacaccaaatatntattattctaaacgctcttaatcaatatgtcttatntctctatatntctctctctatcanatcatagantttctaatattntaattttttctctttaatt

SEQ ID NO: 302521 - DNA, 469 bp, Glycine max
  unsure (1)..(469): unsure at all n locations
tcatcagatgttgcatttcggtatcagctcctcttatttaagaacgatatgcacttcttgcattgtaaattagctttatcgtggtgcaactgttggcattgtgttccttcaacgttagtaagatgttttttggtttcaccatcgactttgtcatatcagcaataattttcttttcatccttagtcaatcgctcagcgtatggatgtccaactaaggacttggccaattcatgattatgaataccacaaatcaacttcaccatccaaccttccnctccatgcactggtttcccacgaagcctgaagggacaaccacatttcctactcccagtgtcttttctaatgaattctttattcctacacttgtacgtaccactcctttcacacncaattaagacaaatgaacttcttcctctgctatcggtatctgtgtcagacctcataatcattgcaacaaatccattntcatt

SEQ ID NO: 302522 - DNA, 390 bp, Glycine max
  unsure (1)..(390): unsure at all n locations
ttctngccatccagctcgcccaggcgagccaggttgcttcctccagaagcaaccgccttctggaggaagaatctagaaggcccaagtgggtctggttgctatttgcacctttttttttttactaaatacacccctttgctttttttggtgattctttttctataacgttacaaagttttacgaatttcgtaacgatacttgttatctttccgtaaggttacagaaccttacgaaacatgtaattactccctttnttagctttcgaaatgttacggaaactcacgaattgcgtaacaatacttcttttgatttcagcatgttacggaatttcacagatggcgtaacaatgttntcttttgatttccggcatgtctcgaaacttcatgtatg

SEQ ID NO: 302523 - DNA, 452 bp, Glycine max
  unsure (1)..(452): unsure at all n locations
tgctacagatattcttgggcctgtgttctgtgataagttacggtgatacacactgacaaacttgtcatttgtgataagctgcaccagtatgaaacaaattgattaatcaactgattttgctttttctgaattcaggtatttaattaaccaaaggcgtttatggagctaaagaaacacatttagagaaaacggtttatcaatcataaggtttaactatatatatatatggtcacggacaggtcaaggagtgtatagaaggggagagggggcaatatttttacataattatataatatttatgttntaataaataataattttaaaaatattgattattaattctatgaataacattagagatatatctattactaattcttttaagcaaatattatctcaaaaatatattctttatatagaattttctttaatataattttttatatacacac

SEQ ID NO: 302524 - DNA, 419 bp, Glycine max
  unsure (1)..(419): unsure at all n locations
ttcttgtttaccccatgttgagtttgcttacaataaagctgttcatagcactactaattgttctccttttgaagttgtttatgtttttaacccactaacttctcttgatcttttgcctatgcctaatgtttctatttttaagcatanagaaggtcaagtaaaggcggtctatgtgaagaagcttcatgagagagtcaaagatcaaattgacaggaaaaataaaagctatgctaaacaagccaacaaagggagaaagaaggttgtcttcgaacctggagattgngtttgggtgcacatgaganaagaaaggtttatggaacanagganatcatagcttcaaccaaggggagaatggaccatttaagtgcttgaaagaatcaatgacaatgcttacaaagttgagctacccagtgagtata

SEQ ID NO: 302525 - DNA, 469 bp, Glycine max
  unsure (1)..(469): unsure at all n locations
gtgtntgctccgtgcccctatttaagggacctaanaggtatagagctaactangcatttagtgataacccccaaggtagtcatatctctcttgatggtctctagaggtatcatcccctttgaagaacatattgcagtagtagggactactagcaacaataagttttcaaagagaaaagctctagatgagggttcactgtaatcaagcaagtcggagacctagcatgatcacagattcacctccgctccttatgttcccatgaacccgggtatagggcactntttccactcacagtgtgtgcaaatagtgttggtgtttgtgtgcatcanatgaataaatatttacctcatgcatacattntanaacgcactataagcaacaaagagtttatacacacaagcacataagacaaataaagggaaaccaacaaaggagaaagtcacgataaaacattgcacaagaattaaat

SEQ ID NO: 302526 - DNA, 442 bp, Glycine max
  unsure (1)..(442): unsure at all n locations
ttcttgccatgatcatggcagacttcgaggcctggttgaaggagttagagtccaagctgaaggagttcgagcagcgggcgactagggagagagaggtcaggcagcaacttgaagaagagttgctgatctacaagaatgaggttttggagcagcatgagaaaggctntaaaaaggttgtcaagcaggccggattcttccaaaaggaccttgacttgcgtctttttgaccctttcaattgtttttggaaggttattatgactgaatttgattgtcaatgttnttcacaagacctagtcaattacccatgcatttagatntgtcgtgctcatctttatacatgttctanaatcacttaataatatggttattagttntaaaaataaataatanaacatatganaaactaaatattcaaacaatataggagaaatctttgtcgagt

SEQ ID NO: 302527 - DNA, 442 bp, Glycine max
  unsure (1)..(442): unsure at all n locations
tcggaagaaagtgatgaggtacaagccctaaaggcagtgcttgaaagagcccgagtagtcgaagagaagttcaagtccatagccatcaaagtctgaaaagagtatgatgaactaagggacgtcaatatggccaccgctgatgccttggaacgagaaaccaagaaggcccaaaaggaagaacacgtgccagcaaagttttgaggggctttatagggcagcaatagtaagctcaagctccgaagaggtgaaaggaatcatcacgggtcagaggcatgatcttgaaggacgagctaaaggcttaccttangtcgaaaagaaatttgtcccaacagttaagcgagactgaagggaatatgtgggccgtcatcgatgagtgcaaagagaagctaaatctagcggcgactcacgaacaaaggctagaggatgagtacgccaagatatc

SEQ ID NO: 302528 - DNA, 275 bp, Glycine max
gcaataagctggaccgggatcttgagcgactgagtttgcagctgattcaacaggggagcactgcgggcgcggatcaaaaaagagtgcggaagtcaagccgcccggactcgagaactccgtctatgatccactaacagacacggcgcctggtccaaccgcgcgaacgcttgcctttcactcgatcttcttcttatctaaacggatgtgaaaaaccttatttacattcgagtgcgcgctctcgcactctcaggtggaaagtgtcgctcccccacgcg

SEQ ID NO: 302529 - DNA, 250 bp, Glycine max
accactaagcttatcaactattttatttttctgcaccaccatcttgaaggatctgtactttctattacattttataaataaatccaatatacaccaaaaaaaatgccaacgaatcagcgccccaaccgaagtaagcggcagagccgtctcttcctcaaaaccaaacttctccttaaaaaaaaaagaagaatctatttgcatatttaaatgattaaaaaacagatacactatcgagctatatgtcaaaata

SEQ ID NO: 302530 - DNA, 440 bp, Glycine max
  unsure (1)..(440): unsure at all n locations
agctntatgtattgtaaatacagagatttttataaaaagtgtatcctatctagagtagggatggccaaaanaatccacgcctgtggatatccgcatataacatccgcaatgaatttgaaacgggtagtgtaaatggatatccgctacctgcagatacgggtatttcatctacctattagttaatgcggtgggggaggatatcgtagtcccttgcaccatgggtacccactacccgtagaattaccaaaataacctcatatatatataacttcgtacccattgcccagaggctcttcgctatgcgaaggtatggtggagggatattgtacgcagccttacccttgcatatgcanagaggctgtntccggattcgaacccattaccaaaataacctcatatatatatatatatatatatatatatatatatatatatatata

SEQ ID NO: 302531 - DNA, 455 bp, Glycine max
  unsure (1)..(455): unsure at all n locations
tcacaacgtaaggaattgtcccagtggcaaactgtcgatatcacctgccctgtctccgtatcccaatacttaatattcttgtcatacccagcactcaaaaacttggtcccatcattgctgaaacagatatccctaacggctntcgagtgtcccatgtaagtcctcatacacttgccagagttgaaaacatcccacatcttaatcttggtatccatgccagcagagagaatcaaatggccatacttggggaacaacctaatagcagacacccctttggtgtgtccactccaagtatgaatcaatctctcgggcatataacaatgatcattactcgcctttgcatccttgngaggcgcgatccaagacctaccttggtaatccttctcctctttcccatgaaaaagtgctttatctttaacaacctcaactnttctccctccanaaccactcttctc

SEQ ID NO: 302532 - DNA, 437 bp, Glycine max
  unsure (1)..(437): unsure at all n locations
agcttgngtgatgttgcgcgtactgatgggtaccatgaggtgtttgctgnggtttgacccatgcgggtgttgaagagacggcatgggcatctccttccttcctttntgcccctgttgccccgattcttttggcgttcacgtttgtggaggaaacgtaatcaaactttcctctcttcaatccaacctcgattctttccccggcaaacaccagatccgcanagctggacggcatgtaacccactagcttctcatagtagaacactggcagagtgtctaccatcatggtgatcatctctctctcaaccatgggaggagctacttgtgccgccaaatccctccatcgctgcgcatattctntanaggtttcaccctctntcttanacatattctgcaattgagtacggtcaggagccatatcagaatngactgatactgct

SEQ ID NO: 302533 - DNA, 445 bp, Glycine max
  unsure (1)..(445): unsure at all n locations
ntctggagtagaaacatgggaccaactcattttatttcaaaaaggaagtcgtatctagtcaaggtctgagagaccatacaagtttcctaacgatttctaattatgtgggccattaagtctatcatatgctgacaatagccgagaagcccatgaatctcttcgggggcggagtacgtgtctgccatcgccttggccttggctaacaatcggggaagttcttgactcccgttcaaggtaagagcaaaccgatccatccacatggttgcctcttggtgtaaagagtcgatcacccttcctctagcctctttttccgcgtatacttgggcatattcgtccgcaatcctatgctcgtgggccgcggctagacctaactcttcttggtacttggcgatgatagctagcatattggtctccgtctcgcataaacgctgagacaagcttcttt

SEQ ID NO: 302534 - DNA, 448 bp, Glycine max
  unsure (1)..(448): unsure at all n locations
cagcatccaacttcgcatgagcaccgcctatcactctanaatcgatagattgatggagttcctcaacagtacgttggaacaatatctccatgcctttgtgcattccaacccgtcgagatggggaaaattcctcacgttacagaatggtcttataacaccgctgttcattctgccacaggactgtcaccttatcaaacagtttatggtaaacctcgtccatccattccccattatttgcttgggtcctctactattgaggctgttgaccaattgctttcagagtgacaagctatgttgcaagctctccataagaagcttttcaaagctcanactgctgtgaaggtgcaagctgacaaaaaacgcatggaagtgtcctatagtattggtgattgggtttatattcgttttttcccctaccatcaaacgtcagtttccaggatgacatata

SEQ ID NO: 302535 - DNA, 472 bp, Glycine max
  unsure (1)..(472): unsure at all n locations
gctcacgcttatacaggcatggngatgtcaagtgccaactattccacgccacacactctgctctttgcctccttgngcctntcttatcctctgccaactcttttaccctttctctttccactcttctttttcaaactaacataacaccttgaacgtgacttccccatttggaaccaaacaattagtccaaaatagatagataaatattcttatatcttaactactttttctttctttatttttatattcagcttcttttttcttttaatttgatttggtactagttctgtatattgcatcaagcattattcttctcttttatctttccgttttctgaatgttttgtccatttctttggatgctattctataatgacaatcacggctcctttttttcttccctctctanactaaaatatcgagtatatgcaatccgattcttatgtagaaggtctccacactttcctatatat

SEQ ID NO: 302536 - DNA, 327 bp, Glycine max
  unsure (1)..(327): unsure at all n locations
gatactactacaatacaaaggctaagatgagcggcacgcgccatgtattggtagtgggattagaactttgcttgtatctttctgtcatcctttacctcgcacttcgggaactgctgccactttcaccctttggattctttccttctcaaaccacaaagcaatttgtccaatttggatcacacactcacatacagccgattagaaagaccttcgcatttcactatttcttctcttctcacacaagatacatangattttcttcttctgctaccttcaaacatacaagaagaacatgcccctatcgagttacgtgactcactcacacat

SEQ ID NO: 302537 - DNA, 493 bp, Glycine max
  unsure (1)..(493): unsure at all n locations
gctctttctcctaagatttaatcggattatttttttgaatctactctgaaaagctctaaacctcatgacaatggaggatatacatggagaataagatcaagaacaaggaattaaagtgaattgaccgaacaaaaagatagaggcagaaaaagaacatcacatagacaaagatgctcttgataccatatgatgtagctccatgtggagcttgtaggccttggatcttcttcatcaattgagtcctttgcttcttgaagattaatggcagcagaatggagaaggaagaaagatgattggagatgccacttcaaggagaagatgagtcaagaacaagctcaccaccatangaagccatggataaaagcatgaaggtaggagaagatgagtggagagagaatgagagaagaagcacgacatcttgtgcctcacatgaggtctgaactntgaaatgtaattctcacatgatcaaagttggaacaatgcacacacaacg

SEQ ID NO: 302538 - DNA, 359 bp, Glycine max
  unsure (1)..(359): unsure at all n locations
atacaatccaagttggaggaatcatccaaatctgagatgggcaagtcctctacacaacaacagcctgtcccttccttctagaatgctgctggtccaagcaagccatatgttcctcctccaatgcagcaacagcagcaatcacaacaaagacaacaaacacctgaggccccttctcaaccttccttananganntagtaaggcaaatgaccatccagaatatgcaattctagcaagagacaataacctccattcagagtctgaanaatcacatggggcagatggctactcanttgaaccaagctcactccccaaattntgacaaattgccttcacagactatgcagaaatcgaaaatgtg

SEQ ID NO: 302539 - DNA, 566 bp, Glycine max
  unsure (1)..(566): unsure at all n locations
cgccgcgcancattgagaccgttngantttgcnnnacnntgtatacacttgtgacactctacaanactcaagctngcacagaggagcngctaacaaatttgaaacnccnctcattttttacgatttatattcaacatcttctcatggctcagttgaataaaattctttattaaaacgactcaatccaattgctctctatatgatctattccaacatgtaattttaccttgaaatatttcaactacatgattaaaatgaattacccagataaaagtgatcatctaaacacactcttagtgactttatccggctcgtctactggaatttacgtgtattcgagacacgaaaaattacaacatacctcaaatgttggtcaaacaatatgaaatcgacgagcacacaatcaattcgtgcgccaattgttacccaatcatacagagcagatcaatcaactctataacgtagagcatcgtacaataccaagctcacccgcacaaaatcaatcacaattttttagtgcataacaatcgtacagtactatagtcacgagtacatgcctgaactcg

SEQ ID NO: 302540 - DNA, 436 bp, Glycine max
  unsure (1)..(436): unsure at all n locations
tcactcctatatctcatctctagcttgcattntctttctttacccactcctcacgtttggttttttaaggaaaacaccataactaaacgcgccgcaagggatccctatcgcaccagatccaaatctagaacgatgggtgatcaaaaggagacgcangaacagatgaaagccgacatgtcggctctgaaagaacaaatggcctccatgatggaggccatgttangtatgaaacagctcatggagaagaacgcggccactgccgccgctgtcagttcggctgccgaagcagacccgactctcttggcaactacgcaccatccttcctcanacatagtaggacggggaagggacacactgnngcacgatggcagccctcacctgngatacaaccgagcggcttacccttatggattgccgccaactattcccacccatc

SEQ ID NO: 302541 - DNA, 368 bp, Glycine max
  unsure (1)..(368): unsure at all n locations
cccatctgacctactagcccaattaacatcgacactacccgttgaaaggatatnaggtgatacaccaaagcttccaaacatggaagcaaccatgagaggtgtcctctcttcataacctatnttcttcgaggcaacacaccttccataccaaaaccctaccccatcaatatcatgaccctccttttcaaccgcatctgtgaaactaaccagatcatctgctgcaaaaaactcaagcaaagctgaaattatatgatgcatcccttcttttgcatactcctccatgaccaaaccaaattgagaatgtctcccttggaacaccgacatggagaaataaatattccttaaaactcggcagatctgacaatcac

SEQ ID NO: 302542 - DNA, 474 bp, Glycine max
  unsure (1)..(474): unsure at all n locations
tctatagatgctggatctttgattcttaatgaggtctttcaatggtgattttccaccatggagatgcagcggaagataatagagagaaggtgaggggagacgccatccactagggaataagccatggaagaatgagcttcacctccaagagagtgccttggataagaagcttagagaggaagcttcagtggaggaaaaaaaagagagagagaaaganaaagggggtgagcatgaaattgaaggaggaaaagagggagagaagttggactttgtagtgtgtctcacaagactctcattcatcaaagttacaacaagtgttacacatgcttctatttatagcctangtagcctccttaagaaaacttcttgagaagcttcctttagaagctagagcttagctacacacacccctttaataactaagctcatttccttgagaagatntctggagaggctagagcttagctacacaca

SEQ ID NO: 302543 - DNA, 368 bp, Glycine max
  unsure (1)..(368): unsure at all n locations
attggtatttaaaatttcatttttaaggtttctntaacagtttaataaatgggaaaatattatatcacttataggtacaatgccaacaaatcaatggacaattgtgccttttgcaatgctgatggtgacttcttgatagttccccaacaaggaagtaagtcactacaacaatttccttgatggttcaatgttaactaagacagttgtgtttgggtttaatttcattatacttgtgtgcatatagatctctctgcacctagataatatgcttgttgatctgtgccaatgaacttggctggacttgaatataaaagaaatttcttaattgaaggatgcaatgcatatgaatgacacatattgttcttttc

SEQ ID NO: 302544 - DNA, 315 bp, Glycine max
  unsure (1)..(315): unsure at all n locations
aagttaagatnattanaggaattaaaganaaacaanagataggaagtgagttatttnattnntaantaatgaagagaataaagataacatgtaggtataaatatnatataaagaaaatacaacttatttaagcatgacttacgttatttcaccactttgtcgcataacattacctcgcaacaccacacatttcatttattttcacaacattcacgtactcaaggatctaaacacaatatcatcaagtcaatcaatatcgatcaatacacaagcgttatgcaacatatacactaaaacttaatcctatatgcaagt

SEQ ID NO: 302545 - DNA, 469 bp, Glycine max
  unsure (1)..(469): unsure at all n locations
tgctgcanacatctacaacagacctcctcaacctcatcaacaaaatcagccacaacataataattatgacctctccagcaacaggtacaatcccggatggaggaatcatcccaaccttagatggtcgaatccttcacaacagcagcaacaacaacaaccttattttcaaaatgctgctggcccaagaacaccatacgttcctccaccaatccagcaacaacaaaaacagcaacagccccagaaacaaaaaacaattgaggcccctccgcaaccttcccttgaagatcttgtgaggcaaatgactatgcaaaacatgcagtttccacaagagaccagagcctncattcagagcttaactaatcagatgggacagttggctacacagttaaatcaacaacagtcctagaattctgatagaataccttctcaatctgtccaaaatcacanaaatgtgagtgcgaatacattg

SEQ ID NO: 302546 - DNA, 461 bp, Glycine max
  unsure (1)..(461): unsure at all n locations
agtctacacagtttgagtcgcacacttattctaagcactttcttttctatctttgtccttcaaaagtgagaacacgaggtggttattcatagagaaaatggttataacctcttataatcgattaaatatccaatgtgatcaattattttaaagaagtaatcaattatattatcatttcaatcgattaaagtattcttcccaacatctgaaaaactttcaaaaacantgtaatcgatttgattattgatgtaattgattaaagtgttcttgataacttctgggaacacctttaagaatgaagtaatcgattacgatcatctggtaatcgattaaagtagagactcgtgacatatcagacatggtctcaactaaactatataattgattaaaccgaaactagaatntctctgcaagctacacatactcgtgtaatcgattacgataagccttgtaatcgattc

SEQ ID NO: 302547 - DNA, 407 bp, Glycine max
  unsure (1)..(407): unsure at all n locations
attatcttcgagactcgtattgtgagtcagatcaaatatttgatgggttactgaattcatattattccggaatgaggaatgagattcaacactcacatcaacatcatttgcgacaggagaatccggaacagtgtactctgtaagctcctcaccagagactgaggttgataaatactcaancgctgtcttatcangaatgctggactcttcaattttctcaagaggctggtcttcatgagtagctgtattcgatgggatccaggatacaccagtagatgttcttgaatgagaatggctctcaacagcttccacaaaacttacagagaacccaacctgacatgtttctgatgctncatgatcattgctgacatatgtggctgcgaatcatatgccaatataccaacttg

SEQ ID NO: 302548 - DNA, 61 bp, Glycine max
gaacctgaaacacccagcccgcgaacgcgaacaccgagcagcaccttgccaattccccccg

SEQ ID NO: 302549 - DNA, 478 bp, Glycine max
  unsure (1)..(478): unsure at all n locations
gcttgccatgttaaaggagaaagcatcacatccttttaaggctgannttattcagttctttctcttcatttatgtgcttaagcaacggaagctgaaccaatatacctgcggatattaacaaaccaagcctcacaataaaaaaaaaggcccaaaacaaaaaagtgtaatcgatattaaaaataacacatgcatgaattgaaaaagcatgtgttcaggcatgtaaagtaattgaggcacaaaaatgtgaagttaattgataagtatgatgaaaatcgaaaagagtgtaataagtgacgaaccatgtacatcanggttaacattcaactcgtgaacttgttttattagttcagcttgcgagacttgttcgggaaggtccacatcgaaggatttgattcccaattcggcgcatgcctttctcttcattcccacgtagctntgtgaatcctttctgttccctactatcacaactgctagtccc

SEQ ID NO: 302550 - DNA, 340 bp, Glycine max
  unsure (1)..(340): unsure at all n locations
aagctatgctgaaacatctaaacacaagcagaactatttttaatganaacctcttgcataagcgtaaggcttaactatcaagagcagaagcaaaacgacgaatgaatgcttaaccatccatgacgaaagcttcaacactgctgaatcatcatggacagaaccttacataaaaagctgctgagccaacaacaccatacgttcatccagacttttcacaaacactttgtgaaccaataataaccaacgcttaaccactcatgacaaaagctaaaatcatcaaaacatagctaagaggctgatgacaataacctacaacaggacaaatatcaataccacaatg

SEQ ID NO: 302551 - DNA, 443 bp, Glycine max
  unsure (1)..(443): unsure at all n locations
acataccanatgttggcctaagtaatttgctataatgtattacggttatgtgtnctaattngagtttatgaaaaatgacaaggcaccatagcatttatgtaatgttgagttatagttgggaggtttctttcagtactattattaattctgtaaatcagtgatttgtcctttctttccttccattccaatattgcattctcgaccactatgatttcttcatagtttcttattttcngttgtttatccaaacaataggggtggtcacaggtcggattggatcagatccgtggcattntccgatctgattcgatcaggttcaatttggaatggaatttgtctagtttaagtatgcaatccgaattgcagtggcaaagcttccgacaaatanaattgactaatgtggaatattatnggtcacttattcgcatttttaagtaaagatt

SEQ ID NO: 302552 - DNA, 441 bp, Glycine max
  unsure (1)..(441): unsure at all n locations
tgccacccagctcgcccaggcgatcagggttgcttcctctagaagcaatagccttctggaggaatcttctggagggctcaagtgggcctggttgctatttgcacccncatttttactaagtacaccccctgcctttttttggtgattcttttttcgtaaagttacggaaacttacgaatttcgtaacgatacttgttttctttccgtaatgttacggagccttgcggattacataatcatccccttttttgacttacggaatgttacggaacctcactaattgtgcaacgatgctcccatttgatttccggtgtgtcacggaactttacggatngtgcatcaatattttcttttgttttccagcatgtcccggaatntcacaaattgcctaatgatgagtgccaagcacctcacaaggaccanacaaaagttgcatgtcat

SEQ ID NO: 302553 - DNA, 328 bp, Glycine max
gatagcttctgccgatggaacagctaccggagagacgtcttactgaccctcgtttaccaatgtaagttctattgcgaagaaaaacttggttgaggcaatattgttcaatatgactatataaaggccacacatgaaagtaaattatgttctttgatctattgagatttgggtcatacaacagggaaacccatatccttgccattaatccatccttgcttcagaattgaacctggaatctccaagttggggtgcctgatccttactcattgaagtgtctgattgggtttggatattttgcgttggtgaacaaatcttcaagaacaaatct

SEQ ID NO: 302554 - DNA, 459 bp, Glycine max
  unsure (1)..(459): unsure at all n locations
ntcactacagctgtctatcttattaatagactttcgttgtcttctcttaattntgaaactccttactttgtcttacatggcacacaccctaactattcatcgctatgtatctttggttctaaatgttttccttacacttgggatgcacgacataacaaattcgaccctaaaacccttccttgtgtgtttgttggatatagtgatatacataaaggatataaatactttcatccttctagtaagaaattttttatctcatgacatgttgtttttgacgagtcattctttcaatataaaactaattgtcatcatacaatttcctctcctacacagcatgtagttagcataattgattcttggctacctcatactaactccagttcttgtgcagacctaacaacaataacaacagctnntgcttccgttcaccatgctcaaatctttaatgaatctcttgct

SEQ ID NO: 302555 - DNA, 437 bp, Glycine max
  unsure (1)..(437): unsure at all n locations
tagatgaatcatattatttcaaggctgatttaagctttcttgagaagcttctatgaagggtggatctttgagctttaataaggttcttcaatggtgattttcagccatggagttgcagcggaagataaaggaaaagaggtgagaggatgcgtcatccactagagaataagtcatggaaggagaagcttcaccaccaagagagtgccttggataagaagcttagagaggaagcttcaatggaggaagagaatgagaganagaggcatggaaattaaaggagaatagggagagaagttgaactttgaagtgtgtctcagaagtttctcaatcatcaaagttgtgacaagtgttacacatatttntatttatagcctangtgactaacttgtgaatntcattntcatttcatgtgaatntaaaagaaatattccaagaat

SEQ ID NO: 302556 - DNA, 386 bp, Glycine max
  unsure (1)..(386): unsure at all n locations
tgatttatgaattgattttagccttagttttactntgtttattagtcaattcgattaagaaagaaaatcccaaagaaaaaacgtccgattgatttttttatattattttattcaaagatattttttgattattatattattattttgcctctttttggttttaaacgtggctacgccatgatagatcggtcggatattattctaacagagattaaaagatgttacaactcaaatgatcggtggaaatttattttatttttgattaggcgagaaaataacataaataaatgactaaagcacgtcaaaagggggtacggaaagtaaatgaaataaaaataaaagcatgtgaaacaagtggggaccactaagggcacatagaatgaatt

SEQ ID NO: 302557 - DNA, 445 bp, Glycine max
  unsure (1)..(445): unsure at all n locations
gaatattgttgtagaagtctgtggaggcttcattataaaataaaaacttcgagtgtttggtcttagtggaaagcctaaatgtgtaggtatgggacatagcccagattgggttgaactagtataattctttggtgtgttgtttcctttcttacctcttaattatcatttgttgttgcgcacttaaaatctgttttagaaaaacctattttaaaaaatattaatattgattcttgttcaaaaggtttttataaaattgttttatcattcagaagcaacacctactttgagtaagaaaaaaaatagaaactactattttgcagattntgtagctttttcttagtaggttnttaagcaatattgaactgcaagactacttggaagatttacttgaaatattatttatcaatacttgtaatacacaaatactcttgttgactttgattct

SEQ ID NO: 302558 - DNA, 416 bp, Glycine max
  unsure (1)..(416): unsure at all n locations
aaggcgcaaaatctgtctctgcgcatttatcacccgcctcactgctcctgaatgataaagggcgcaaaatctgtctcttcatgtttacccaatcagcttgttgttcttgaatgataaagggcacagaatctatctctgcgcgtttagccactcaacttgttgttcttgaatgataaagggcgcagaacctatctctacgtgtttacccactcaggttgttgttcctgaatgataaagggcgcacaatctatctctgtgtgtttacccacttagcgttgtgttcctgaatgataaagggcgtagaatctatctctgcgcgtntacccactcagctcgttgntcctgaatgataaagcgcgcagaacctatctctgcatgtgttaccacccaacttgctatcatgctttgagtcttat

SEQ ID NO: 302559 - DNA, 463 bp, Glycine max
  unsure (1)..(463): unsure at all n locations
gcttattactntcatggnttattatgaatcttctgcagattctttatgtncaagaaagaaactaattgtgctcattatttctcaattgatttacaatttcattgaactgtcattntctcttgttgtgttcttatataccctaatctttttttcttttttttttaaatagtctttgggaagatgcatcgcttttacctggctttcagcttgtttaaagaccaatcagaagttttgttctatactctatagtgctaaaaaaatggagtattttgcatttggaattttggattgtttctctgaaatatcaaaccctgtaaatacagtttactggtttgctctaggtgaatagaagtgtgcaagtgcaagaacaattgngtaggaaaagtctttttctttctagataacatanaatgggagactgtattatttcggatcagatattcattntttagttaatgctctg

SEQ ID NO: 302560 - DNA, 475 bp, Glycine max
  unsure (1)..(475): unsure at all n locations
tttgaaagcatgtaatcgatacacatgtcttgtaatcgatttccagtgttttggaatgttttacaacaaccataaaaaatttgaatttaaatttcaaagttatgtaatcgattactagtgtttaaatattcaaatttcaaatgcgaagagtcataactcttcagaagtaactatgtaatcgattacaccattatggtaatcgattactagtaaggattttcgaaaataattcccaatagtcacatcttttcatttaaattttgaatggccatcaaaggcatatatatatgtgacttgngcacgaaattntcttagttntacttgctcaaaaagtcttatcctctcaaaagattcaaagtgtcttatcatctaaaattccttggccaaaacatttgtgattcaataaggaattatttgagtgcttcattgtacaatctatctctntcaagagagatntcttcttctcttcttctta

SEQ ID NO: 302561 - DNA, 457 bp, Glycine max
  unsure (1)..(457): unsure at all n locations
ntntggagtaganacatgggactcatctcatttatnttanaaaggaagtcgcatctagtcaaggtctgagataccatacaagtttcctaacgatttctaattatgtgggccattaagtctatcatatgctgacaatagccgagaagcccatgaatctcttcgggggtggagtaagtgtctgccatcgccttggccttggctaacaagcggagaagttcttgactcccgttcaaggtaagagcaaaccggtccatccacatcgntgcctcttggtgtaaagagtcgatcacccttcctctagcctctttttccgcatatacttgagcatactcatccgcgattctatgctcgtgggccgtcgctagacctaactcttcttggtacttggcgatgatagctagcatgttggtctccgtctcgcataaacgctgagacaagcttcttttggaccttgaac

SEQ ID NO: 302562 - DNA, 428 bp, Glycine max
  unsure (1)..(428): unsure at all n locations
tcacattctgcagaagacccatgatatcgtcaaacattttccccgtgtgagactcagccgacccttccaatttctcaggggattcgactgtttcagaagcacagcttgataacttatccacttcctcagaattttctgctgctccaaaaccagccactgcagcacaatttgcattaacatatggcatcaactatntaatttctaattaagagatataacaacaaanaaatcccatgctatggtcatgtgaaaattcaacatgataagattcactatcaaagtaatgggactaacatttaaaataaggacaataactagatccaactccttaagtgcttntaatgttgttctccaattggaattgaattctacctcagtagcttatgctaacctttaatgtanacctttactacatggattactgggtg

SEQ ID NO: 302563 - DNA, 379 bp, Glycine max
  unsure (1)..(379): unsure at all n locations
tgtctcagcgggtatgtgagacttataccaacatgtttgccatcattagaaagtaccaagaagaattaaatctagccacggcccacgagcacaaagtggcggacaaatatgcccgagtgtacgcggaaaaggaggctagaggaagggtgattgactcgttacatcaagaggcaacgatgtgggtggaccgattngctcttactttgaacaggagtcaagaacttccccaattgctggccaaggtcaaagcgatggcggacgcctactccacccncgaggagatccacagactcctcagctattgtcagcatatgatagacttaatggcccatataattaggaaccgctaggaagtttgtaggtcactcagatcttgact

SEQ ID NO: 302564 - DNA, 380 bp, Glycine max
  unsure (1)..(380): unsure at all n locations
actaagcttgagaaattanacacaattactttaccggattctgattgatcatgaaatttcgagacgctcgaattgaattcgaagcttgagcaattcaacgaaataactttttactggatgtttattgaatccaaatatatcgacagctcgaatagaatctgatgcttgagcaattaaacgacataacttttactcggatgttgattggtcctgaatatatccacacgctcaaatgaataccgaactctgacaaattcaaagacatactttactcgatgctgatgagtctgaataatgagacgctcaattgatccaagcttgacaatcaacacatactttactcgatgtgatgatccgatatatcacacctcaatgatccg

SEQ ID NO: 302565 - DNA, 409 bp, Glycine max
  unsure (1)..(409): unsure at all n locations
tctataccactgcctttggacatatatagagccnggttttcgcggttcttaaaacaaataaaaacataaaaagttagctagattaataagacaaattgaaagcccgactagcttttgatatttttgtttttattattgaaaaaaagattactgaaaaataactctaaactcttgatcatttgtgtcaaaccaaagtggcagcttaattagtttctttgtccaactcgacgtacgtttatctaaaagaagcagcaacaagggtgttctaataaattcctatataggttggagaacgagatgaatcatgcatgatatggatttggtacttacgcaagaagacatagtgtggttccagaaatctagaactaaatggattcaagatggagaccgtaccaagtattaccatctc

SEQ ID NO: 302566 - DNA, 438 bp, Glycine max
  unsure (1)..(438): unsure at all n locations
tctagaaggagattaactagatgttctattcttcttgtatgtggcagtccatgacgaatctccttgngaaaggcatctttaaattcctgcaataagggttgaacactatgagaaacataaatggttaactgagtagaattatcactctctctctcttgtgtatcactcttttcctcgggtgtatcactcttctttttcatattcctttgtggcgcctcactattttctttctcttgttctctcttttctctcattctgatttggtcatcacacacttctctaggggatagaggtttaagagtaaacgaggaagatttggctattcgtctgtagggctcttctttgttacggctcaacaaacgttgcatttgtgtagtccacgcgtccaaaaataagcgctgagattcgtccagtngatgatatacaccaccatttgca

SEQ ID NO: 302567 - DNA, 460 bp, Glycine max
  unsure (1)..(460): unsure at all n locations
gaactataaaactcaacttaccataattttctatgcgggatgttcttttcatccaagtattcttatgaaaagcctctctatgctntgaaccctcagtagcacttactacttaactcacacaactacantttgtgggtacacacaaccttaagaagcaacaatctcctaactagtctcctgaggttccctatcctaaatggattctatntaagggcaggtacctaatacatctcacaggaaaaacccatcaataagcctccctcccccaaaagatgtttatagactcattaaggctagatagaattttctctanagttctagagagtccgagctaaggaaattagtataanaaactaatgatatatatttacaattgttgagaaaagtccctttangaataaatgttctaatgatgacaaacaccatgaagcnaaccaaaatactaacttagttactaatg

SEQ ID NO: 302568 - DNA, 479 bp, Glycine max
  unsure (1)..(479): unsure at all n locations
gcaactcanaatctaggcatctaaaacccctcaatttagtggagtttcattgtttgagaagtgaaaatgagaatgggtaaatttggagcaaactctcacttcaaacaagtctatatcatcaatctaaacttgctcaaactggttttacgcctaaaattccaccgaatcaaaatttgactcctcaacacccaatttttaccctagacatggttcttgccttcactttggtcatttgttttcctctcttgcacagcccaagctttctcataagtcctaaatgacatttcaaactaagattaactcactntaatctccatttaccactgaatccagatttggccttccaaaccctcanagcatcacactnttccactcacaggactacattctcactttctaaccctangttaactctacccttcatccctagtagttntccatcagcaatttcagtacataaacatcacaagcatcatcat

SEQ ID NO: 302569 - DNA, 417 bp, Glycine max
  unsure (1)..(417): unsure at all n locations
ntntggagtagaaacatgggaccaactcattgtatgtctganagtcgtatctattcaagatctgagagaccatacaagttttctagcgatttctaattatgtgggccattaagtctatcatatgctgacaatagccgagaagcccatgaatttcttcgagggcggagtaggtgtccgccattgccttggccttggctaacaatcggngaagttcttgactcccgttcaaggtaagagcaaaccgatccatccacatggttgcctcttggtgtaaagagtcgatcacccttcctctagcctctttttccgcgtatatttgggcatactcgtccgcgaccctatgctcgtgggccgtggctagacctaactcttcttggtacttggcgatgatagctagcatgttggtcttcgtctcgc

SEQ ID NO: 302570 - DNA, 475 bp, Glycine max
  unsure (1)..(475): unsure at all n locations
actcatgaaggtagtcgttgactctacccttctgagngagnctgtataacattccctttggatcatcatagaaggtaggagcaaagtgtgactccaaagcttgcaacagggaggaacacaaggtgattaagccattgtgaaacatccattgaaaccaactaagagcaggtccatccatgtaaaatgaggccatggtgatgcgctcctcgtcgagggtgttatggtagtaaaaaaattgggagatcttgaagatccatcccatggtgtcgtggctgctaaaacaagggaaccttgagcttgatatgtgggcgtggatggttatgagatggtgatggtgtangagaaggggtgggctgagttggagctggtgtagttgttcctgaatggaatcaagacgaatgtgaggtcatggtgggcgtcaatgaaggtggattgattctgtgtgaggaggaggatagcttcttctaatcgatct

SEQ ID NO: 302571 - DNA, 388 bp, Glycine max
  unsure (1)..(388): unsure at all n locations
gcttttgctatatccttgaagggaattttgtcccanaattccggctccatctacttttcagtaaaaaaattatttttgggaatataattgtcagttgatttttgtgggggattctattgcgataaaacttgtttcccttttggattaataactatcttggtttgcttggccatttgaatctgcttttgaagttctgtttcagaatcgtcatcagattctgaggcaatttttgcccaagtctttntggctaagatggnggttttggtcaggcccatttctaggagagcttatagtgtttctactgaccaagcatagtcggccgatgtttgtttggcggngtccagtttgngggtttcctgagtggatgactcangtttgactgagatta

SEQ ID NO: 302572 - DNA, 416 bp, Glycine max
  unsure (1)..(416): unsure at all n locations
agctgtcttaagataacttccttgagaagcttgtgtgagacaacttccttgagaagctagagtttagctacacacacccatctaaaaactaagctcacctccttgagaagctagagcttagctacacacccctataatagctaagctcaccccatgacaaaaaaaacatgaaaatacgaaaaaaatcctactacaaagactactcagaatgccctgaaatacaaggctaaacccctatactactagaatggccaaaatacaaggcccagaagaagaanacaacctattctactatttacgaagaagagtggacccaaccttggcccatgggctcaaaaatctaccctaaggttcatgagaaccctaaggccttctttatcaactctagcccaatgctcttggagcctcttgctcat

SEQ ID NO: 302573 - DNA, 409 bp, Glycine max
  unsure (1)..(409): unsure at all n locations
tgagatgaggaagtgtggaagggtgaaacttgctnttattcgttgaccacagagtggtacctggagatatgtcgcggnggtcaggagaccttgngaacgtcaggtggggtgctattgcccaaaaccaagcttgaccaatcccgacccaacccgggcatagtcagtcagtcagaacctgtgatgtacctaaacaggcgagctcctngcagccaacagataaaaggaacaaagaccacaaagcaaggaggcttgtgtggtggctggccagctgtgaaacttgattgatatatgggatgtggcctctggtaatcgattaccanaggtgggtaatcgattacaaggcttataaatgaagacaggaggctaagatggtctctggtaatcaattaccacggngtgtaatcgatac

SEQ ID NO: 302574 - DNA, 338 bp, Glycine max
  unsure (1)..(338): unsure at all n locations
tgaatgacagtcttgtgagacacaactgaaagttcaacttgtctccctgttttttccttcagttgcgtgctgccccctctctctttctctccctctgtctttacctccattgaagcatcctctccaagcttctatacaaggcttatcttggtggagaaactccttcttgcatggcttattccctaccggatggcgcctcctctcacctcttctactttgtcatccgctgcatctacatggtgcgaaatcaccattanaggacctcattgatgctgagagatgcagccttcatagaagtccacaagccagcttccatcaagtgatatcagagcacatga

SEQ ID NO: 302575 - DNA, 341 bp, Glycine max
  unsure (1)..(341): unsure at all n locations
ttagtatgtntaagaatttatttcaagacaattgattaagctatatctgaaaataataaatcactttggttaattaacatgaaaaatgtatcgatatggtcaaagtgaaaaattacattnttaaagatgcgtttttcactttaaaacgattgaaccctttctttctttctttcttttttgttaaagatgacagattcaacggccgaaacaatagacataaactttaaaacaattatataattatgattgttttggatatatcaagctcaaacaatntgtagtggcttttcttttatagaagaacccttcaaaagagaaacaaaggatctacatatgtcaaa

SEQ ID NO: 302576 - DNA, 391 bp, Glycine max
  unsure (1)..(391): unsure at all n locations
tctatagaaggttcattcctaatttctctacaattgcttcacctcttaatgagctggtgaagaagaatgtggcatttaccttgggtgaaaaacaagagcaagcctttgctttgctcaaagaaaagcttactaaggcacctgttctagctcttccttgagtttctaaaacttttgaactagaatgtgatgcctctggagttggagttggagttgtattgtaacaaggtggacaccctattacttattttagtgaaaaacttcatggtgccaccctcaaccaccccacatatgataaaatgctttatgccttaataagagccatccaaacttgggaacattacctttgttccaaggaattntgtattcatagtgatcatcaatcacttaagta

SEQ ID NO: 302577 - DNA, 464 bp, Glycine max
  unsure (1)..(464): unsure at all n locations
gggaaatcaagataatgttgatattaattaatcacgctttattatgtaacattattttataacgttttagaagtagttaaaattatctataaaaaaaagcaataaaaattataaatttttttacaatatgtaatttaaattaatttatactaataaaaaattgtgttttgaaatatatattaatttaagtttagaattctattgatttaagttttgaaatatgtacaacaataatattttaaagcaataattgactttgtgatatatagagtgggtattaatcgatcaaatttgatctaaaattatcttgcagtgtttttcttttagttaaaagttactgtaatattaaagttcaaaataagaattttaaaaataaaactgaagatngtttgccttatatggtacgagtnttttttcatatagtcccgtaataattgacttatgtcatttatntaagatcagat

SEQ ID NO: 302578 - DNA, 312 bp, Glycine max
  unsure (1)..(312): unsure at all n locations
tcgcanactactcactctacactagacactggtgcattgagcanattggctaacgatganatatatagtgtggccagcacatattcatgacccttagatcgcttagatgcacactgatgctagaatggcagagttaagttcatgacatgtctacagctaactcttatgggatgaagatagagattaataaatggaataatatccactgcactataaagagactatactctctgatctctatataatatattaggacacaccatagactaatgagagatctctactatacaaagattacgttgaccctgtgat

SEQ ID NO: 302579 - DNA, 325 bp, Glycine max
  unsure (1)..(325): unsure at all n locations
tgcctcanagaggtccaggaaggacaatgttgccgaatgaactagttccgctccggagtacgacagtcaccgctttaggagcgctgtacaccagcagcgcttcgaagccatcaagggatggtcgtttctccgggagcgacgcgtccagctcagggacgacgagtatactgattntcaggaggaaatagggcaccggcggtgggcaccactggttactcctatggccaagtttgatccagaaatagtccttgagttttatgccaatgcttggccaacagaggagggcgtgcgtgacatgagatcctgngttaggggtcagtggatc

SEQ ID NO: 302580 - DNA, 475 bp, Glycine max
  unsure (1)..(475): unsure at all n locations
agaggatgcttcaatggcgganaaganagagggtttgaaagagagaggtgggagctctaaattgaaggaagaaaaagggagagaagttgaactttgagttgtgtctcacaagactcccattcatcaaagttacaacaagtgttacacatgcttctatttatagactacgtagcttccttgagaagctttcttgagaaaactttcttgagaagcttctttgagaaaacttccttgagaagctagagcttagctacacacacccctctcataactaagctcacctccttgagaagcttccttaagaagattcctaacgaagctagagcttagctacacatacctctctaatagctaagctcacctccttgagatgagaagctagagcttagctacacacccnctataatagctaagcttacccccatgacaaanaacatganaatacaaaaaanagtccttactaganagactactc

SEQ ID NO: 302581 - DNA, 491 bp, Glycine max
  unsure (1)..(491): unsure at all n locations
tcaagcttagctacacaccaccctctcataactaagctcacctttttgagaagccnccttatgaagattcctaaagtagcttgagcttagctacacatacctctctaatagctaagctcacctccttgagatgagaagctagagcttagctacacaccccctataatagctaagctcacccccatgacaaanaacatgaaaatacaaaaaaaagtccttactacaaagactacttaaaatgccccgaaatacaaggctaaaaccctatactactagaatggccaaaatacaaggcccanacgaaggaaatacctattctaatatttacaaagataagcgggctcatacttagcccataggctcgaaatctaccctaaggctcatgagaaccctaggaccttcccttggatctctagcccaatctacttggagtcttctacccaatgcccttgcggagtaggattgcatcactctctttcgtagcttctatg

SEQ ID NO: 302582 - DNA, 476 bp, Glycine max
  unsure (1)..(476): unsure at all n locations
agcttctaaactntgtacaagaatgaagctctgataccacttgttagacaagtggtctcagatatcttaagaaggcgggggttgaattaagatattcgaaactatgtcttctaattaaaaatctatcttactttctacttaagttatgaattcccttagagacaatcttcttaaatattaattcaaatgaagcaacttgaatatgaatataaagcaataataaataaaggagattaagggaagagaaaatgcaaactcagttgtatactggttcggccacacccttgtgcctacgtccagtccccaagcaacccgcttgagagttccactaacttgtaaattccttttacaagttctaaacacacaagggacaacccttctttgtgttagagatttctacaacaagagactcacagtctcttaatcccttagagaatgagaagaagaagaggaacaaatctctcttgaaagagatg

SEQ ID NO: 302583 - DNA, 490 bp, Glycine max
  unsure (1)..(490): unsure at all n locations
tgaccaattcanatgaacgaggaactccttcaatactgttaaaaggaaattcttgatttgcttgataaaggtttaatccggaaaagcaaaagcccgtggtcctgtgcggctttttatgtcaacaaacattctgagcttgagcgtggaacaccccgtttagtcataaattacaaaccactgaaccaagcattacaatgaattatgtaccctattccaagcaaaaaggatttacttaacagattaaattctgcaaagatattttctaaatttgacatgaaatctggattttggcaatccaaatccaagagtcagataggtacaaaacagtgtttattgtacttttcgggcaatacgaatggaatgtgatgccattcggactaaagaatgccccttcagagtttcanacaattatgaatgatatttntaatccctattcacaatttgtcattgtctacatagatgatgtgttaatcttttcccacaacattga

SEQ ID NO: 302584 - DNA, 246 bp, Glycine max
  unsure (1)..(246): unsure at all n locations
cggcggctggcatggccattatcaccgcacgtaaagtgcttgatttggcttctttcacgttaaaattatggattgataatccgtaagttgtatacaatttacgaattgataatccgtaccttgtatataacttaccaattgatcatccgtatgaaccttacngattctcaatctataagtcccttttaatttgttttaatattctcttattgacaatccatatgacttatatagattgctgatcca

SEQ ID NO: 302585 - DNA, 460 bp, Glycine max
  unsure (1)..(460): unsure at all n locations
actaagctttagcccttanacgaaatttcatttactcggatgttgattgattccataatatatcgagacgctcgaaattgaatgttgatgctctgagcaaattcaaacgacaataaatctttactcggatgtctgattcagtcccgtcacatatctagatgctcgaaattgaatgttgatgctctgagaaaattcaaacgacaatatctttttactcgcatgtctgattcagtcccatcacatatcgagatgctcgaaattgaatgttgaagctctcagccaattcaaacgacaataactttctaatcggatgtctgattgagttccgtaatatatcaagacgctcgaaattgaatgttgatgctctgagcanattcaaacgacaataacatcttactcggatgattgattgagtcccgtattatatcgagacgctcgacnatgaatgttgatgctctga

SEQ ID NO: 302586 - DNA, 478 bp, Glycine max
  unsure (1)..(478): unsure at all n locations
cttcagctcctctgacattcatttgangaaggagcnncttcattaccttcatccttggcttgtctacctctatccacttactaaaaatttatgccccagcactattccttccttgcccatgaaatgacattttctcccattgagaactaaaatagactcttcacatctttataatactctttcaagatttgatacgcactcatcaaaagatggcccaacaacagaaaaatcattcataaacacttcaatgcctttttccaccatatcagagaaaatngacatcatacacctctganatgtagatagggcatcgcacagaccannaggcatgcgcccatatgccagtacacccaaanggcacgtganagtagtcttctcttgatctttgcgatctacaacattctgattatagcccagatacccatccatanaacaatantaagaattcctttgcgagtctttcangcatctggtccag

SEQ ID NO: 302587 - DNA, 472 bp, Glycine max
  unsure (1)..(472): unsure at all n locations
tgatcaacccactntgttatgacatcgatgcagggtttccagtcatgtttgaggttggttacattggcatggagagcctcttgaacatcttttctattaagatatgcgtacacataattctcactacatggatcagtcacaatctgcaaaacaaataaacatggcttcaattctagtgaagttcatgcttcatgcaatgttgagttttctaaaatctattaggccagccaaatatttgaagcttactgtgttccttttgggcagggctgtgagatttgcattcttgcatagtggagcataaatattgtataaatcaatgtattcaatatcctccccaagttcatctccggctgcatcgcacacactntcctgaatctttgatgatgatgaatcacaagctntgttgagataagctgctntgtctgagatgattgcatggctggcaagataatcatacagtccgtccgagtca

SEQ ID NO: 302588 - DNA, 435 bp, Glycine max
  unsure (1)..(435): unsure at all n locations
tggactgtgctagatagataaacaaagatgtgaaattttatgaattgatttgggcaagattggatgagaggaagtgtgattttcgaaatctgcactttgtgcagatttttgctgtgaaattgtgcagcaggattttgcacaagtgcagaaaaatgctatgtatttgctggttgtggaaagagtaatgtagaatgagttctggatgtttgctagtagatcccaacggtcaaaatgtangcttatgtactatagacttctagtaaaatgtttgagttgatccaacggttaacgaattggatcgaaggaattgttactggggtctataagtgagaaaagctgtgattntggttggtgtgttgagcagagttttctgcctttgccctgttntgcttggctgtgatagctngtgctgtttgaatgttgctnttcttggat

SEQ ID NO: 302589 - DNA, 464 bp, Glycine max
  unsure (1)..(464): unsure at all n locations
tangggcaggtactatcaggttctangcccatgatcattctatcaccacccccgcgttcggctaaagatattaaagaagctctcctaggaggcagcctagtatctctaactttgctctttaatttcctgtttcatacttgttctttttcttgaactatatcctgaattcgcctaagtttatatgcaattataggattttaagagaaaaaatataacaatgaataacacaattttgtaaaggattttcttcaccaaaaaaataataattacctcgcttgggcgagtggccagctcgcctangcgagcatggctatggtgaaaaacataaaaaggggaggggtgaagccattntcaccctattcttgcccaaaatcaaaacctcccncaagagcttacgggagccaccattggcagcagcccccaagcttcctttgtgcactttttggttcattttttcacattcc

SEQ ID NO: 302590 - DNA, 478 bp, Glycine max
  unsure (1)..(478): unsure at all n locations
gattaaatctgtatgtataacgaattcttattaatggatttcaattntaggtaaggtctataagggtaccatgacaaataatctgaatgttgcaatcaagcatataatcaatgatgatggaaatgtggacacttttgtcagacaaattacaagcttatctcatggcagacaccctaatatcagcagttgcaaacaatcacagtttacttggtgccaacttanagtggaattaaacaaggaatatacttaaagtgcataaaaagttaaataatgctcaaaataggcaatcctagcttaaatcttaccctttccttgatgtcacccanagtcggcaagtacaacttataaaattcctctctaaatgcaaccacaaacctaaataaagtttagaaaccagcaagaataagacaattaanatatgtgaattgtataaatntaagggacaacaagatacatctactatattatnagtatttca

SEQ ID NO: 302591 - DNA, 454 bp, Glycine max
  unsure (1)..(454): unsure at all n locations
ntgatggtgttgagaagaaatcacatgtttgtcatcatcaaaaagggggattttgtgaatgtatgtatacatgattntgatgatgtcaaaagaagaatcaaacaaggctcattntgcttcaagattaatacaagattgtttcaacaaacaaagccttgattcaagatttcttcaagatcaagccttgcctcacaatgaaaggtttcaagtcattcaaggcacatgtaatcgattaccaatacatgtaatcgattaccaatggtttgaaagtgtgtaatcgattacacatcatatgtaatcgattaccagagactctgaacattgngaattcaaattntaaatgaagggtcacaactgttcaagaaaaacaattgtgtaatcgattacactaattctgtaatcgattaccagagaggattntcaaggaatatcgtcaacagtcacatcttatcat

SEQ ID NO: 302592 - DNA, 462 bp, Glycine max
  unsure (1)..(462): unsure at all n locations
ctccgcaagacctatgaaaagatctgngatctagctattatagaagtctccatttaagctattgcatctctcactcagtattacgatcagccgctaaggtgcttcacgtttggggactttcttctagtaccaactgtggaagagtttgaagagatcttgggatgtccgctaggaggaagaaagccatatcttttttctgggttctatccatccatggtgagaatagccaaggtagtcaaaatctcggcgcaagaattggaccgagtaaaacaaaatagaaatggggtggtcggaataccgaggaagcacttggaggagaaagcgaaggctntggcggatcaaggtgaatgagctntgttcattgacgtcttggagctattggtatttggagtagtcctttntccaaatatggatggattggtggatntagcagcgatcaacgtcttccttgcttatcaccat

SEQ ID NO: 302593 - DNA, 463 bp, Glycine max
  unsure (1)..(463): unsure at all n locations
tgcannaatgatagtctctaccaaagtctctntccatgttatatctaacattttcagttgaatagaaatatggtgctaactntaagtggcctanattagtaaaaggacatgctcccactctgaatgatacttcctcataaaaaacaaaccattcattttgagggaagaaaaggagaacaaaataagaaaaagaaatggacagagaaagacactcaggctaaggatggtactaactaagcctcgggttaaacagcttgtctccatgtcaataactaaacaactgtagaggatgtcccatttatctaattcatctttgaatagaaatggcattccctgaccttctagacatcttcatgagcttgactagaaatctccggttgattatccaagggcatgtattgngccataattgcccttatctcagagtccatatatctctgcagaaaaatatttctcatgtaat

SEQ ID NO: 302594 - DNA, 485 bp, Glycine max
  unsure (1)..(485): unsure at all n locations
tattgatctgactatgtttctaattattataaattgatttatttccagcctattaattcaatccttactatcttaggcaaggaaattatggactgaagagagggaactaggactactggatgagttgttaggaaaacaatgctcagtatttgaagtcacaccatgcatacaagtcagcctattatgtgtgcaacanagaccaaaagataggccagacatgtcattagtggttttattgttgaatggtgaaaaattattgccaaaaccaaagactcctggtttttacactgaaacagatgttacttctgaagcaaaatcttcatcggtaaatcacatgctatgctcagtaaatgaactttacattacaattttagatgcaaaanaggaaacagaggcaagaaaatgccaagggttcaccttcaaatgtgggatatatcaattatttgagcattcataactagtaaaagttgtactatgangctcta

SEQ ID NO: 302595 - DNA, 466 bp, Glycine max
  unsure (1)..(466): unsure at all n locations
tgaggaatcttanggaactattatagacactactatttctgtcgaattgcacacatgagttgttttacaggtaagggatgaattcattgcaattgggggttaggatgaacatgaatagggatccttataggattaaattgagatttattttaggatgtttattgaattataattttcttttacaattataaatacaatatttttttgtttgacggaccaattgatgtcctgatgcgaatcggttcataaaattgaatgttcttgttgtttcatatttttgacctatgattntgattcatttattttaatatgatagtgagaaattatttgaggggttttactctccatgttgtgaanaacgttnttgtataactttntatattaagattatggaatgatgattcacattgtgagtaagtgacaaattgaacttgtgatgaatggtgatatacatgtgtattgagat

SEQ ID NO: 302596 - DNA, 442 bp, Glycine max
  unsure (1)..(442): unsure at all n locations
tgatgactatggtgtgttgtgggacttctccaccaatgtagatctttaattnttggcccttacctaactagccacgatctttggattggtcttctatctttatagctccatagggcttaacgtctttaatagtaagggggccactccttctcaattgtaattntcgagaaacaactttaatcttgagttgtagagcaatacttgttgtccaggcctaaattctttgaggaggatatttttttcataatacctcttggttctttctttgtagagcttggatgattcgtatgccttgagtcaaagttgagaaacttcatggctcaatgagcttttatttctaataccactggtaggtggcattctttnttgtacaccatttgaaatanggaaaggccaatgggtgttttgaaggttgttctatatgctcaaaggcaatcatcaa

SEQ ID NO: 302597 - DNA, 341 bp, Glycine max
  unsure (1)..(341): unsure at all n locations
ctcacttagttatcttcccttaagtaatcctggcttcctcaatgagctctgctcttcttaaataaatcgctatcttgacttgattataatgactaagcatcataaattcattacttttaatattctctacacaaaacttaaatgatattaatgtaataattattttctcaaaaaggaacaagtatgagaaaatttttacaaatttctatataatttaaccgcaaaatatattcttaattagcagctatcatcagccttctttatttatatgttgctcaacttgacaattgttatccaatgtgatacttcaccttcatacttanactctaacaatattcata

SEQ ID NO: 302598 - DNA, 407 bp, Glycine max
  unsure (1)..(407): unsure at all n locations
ntctattatacattaagcaaggttcagtgtttcgcattataagtttgcctaaattagtgttgaataaccagtaaccaaagaaaagcagaggtaaaacttttaaagaataaccaataaccaaagttgtataaagaataagcagaggtgaagaagctaggtaggctctacttttgaagtggttactggttcagtgctgaataaccagtaaccaaagttaaatgtccatttactcttactctgatgctagttcataacatgttatatgtttgttccttttacagcctgggaagcctgggaatcaattcatttgatttaagtagtttatgcatggaaacgtgttaaagaatgataattgaatcattnttttatctagtgtatgagcatgtgaaataacaaacgatgtcact

SEQ ID NO: 302599 - DNA, 471 bp, Glycine max
  unsure (1)..(471): unsure at all n locations
ntagtggtttttttattagtcattgacatctacatattctgagttttagtctcttccatctttgacattctattaggttgttgttgttgtgatgaacctctatttgaaggaccatgaccacctttataaccttggtaattccctttgaaacgttgttgtggtcatccttgattctgcatatagtgtacttccttttcctattgatagtaattggatgttgaacaatgaccattctaatgattaccttcatagaaaccataactaagtacttgttgaacttgatgatgttgtgatttgtgagagcttcccgattaaagttgtcgaggaagttgaccaatctactntgttaaggctnctaattgttgacttatgagcatgttctgaactagaattgaattcggagtatccaactccattattcctttcctgtgaacatgagccctatcatgatgacctttgatatcactagct

SEQ ID NO: 302600 - DNA, 452 bp, Glycine max
  unsure (1)..(452): unsure at all n locations
tctgtagctaatttgaataactccaatctatgaaccttattaaagaggattcaattcaactatgctctattcatgtgtatttaccattcactatctaagtgtgtcccctagctaattactacataggttttttttatatcataaaagtgcccgaaataaagtaccagtatggcaaacaaagctaggcacattctgatatttcttgctttggaatctctatgaacactacgataaattatacaacaggaggaatccaggctaaaaggaatagaattcctgaaataattattatgacctttcaaaaagtggtttcttttacaaacgattgaagatggactagttgcgagctggctcttgcatgatgcatttggaattacttcaacagcacgatgagcangaatgattcatccaaacttgtacaagaccttaacanatcacagacatgtgtgcgt

SEQ ID NO: 302601 - DNA, 456 bp, Glycine max
  unsure (1)..(456): unsure at all n locations
ntgngataaaaatggtcattgaccaatctctattctttgacttgacccaattatctagtgaaggtgaacttgacacaaacctttgggataaagctttttattctcacctcgaaaaagctttaactaattcagaataaacaagcaatttcaaagacataaaaggagtgagatttgagttctgaaatgcctgaatgcattcaaaactctcattggaaaagaaatccatgtctatgaatttaggatcgataatggaacgagaggagaaaaggtttgtgtaccgtatccgttgttcttctgatgagaacagcaaggaagaggaaatggaggagggaatctatgtttcctgagcctcgaagtgccgctggcttcgactcgaagaacccttgtgctnnttttatggttccctcatttgagagagttatntgaaatttcaatcggttaaagtgatagagaatg

SEQ ID NO: 302602 - DNA, 463 bp, Glycine max
  unsure (1)..(463): unsure at all n locations
attgccttaatcatttccaaatatgcatgtgaattangatgcatcaattagaatcaagccaaggctattgtgcaagcaatcaatggggcaaaacacaccaaatgattataatgatggatggctcaaattctcacaaaggtaaaatcatcactttcaaattgagctttcaaaactatcatgacatgtagagaagaatcaaggatttcaagtcacaaaatgtcaagaacttttattttcaaaacaattacccatttcttgaacatatcctataattcaaagaaaaacatgcaaagtcgtacgtgcacacaaaattgacccanaatattaaactaaaaatccgacgaaactaacaacattaacaaattaacacaactaacanattaacaaaaccatcaaaactagcanaaccaaagaacacttccccccatacttaaacaacacattgtcctcaatgtagcacaat

SEQ ID NO: 302603 - DNA, 489 bp, Glycine max
  unsure (1)..(489): unsure at all n locations
gctctgtgtacccttaaaccgtaaatagtggctattcatattatatagccaaccttttactctatctgnngcctcaagtttggaagctgattaactatcgaatgaataatagatagataggtgcttgtcccccgaccatctcttacaaagtcaataataatgttgcctttatattgtttgttgctagagttattcatttatttatgcttacaagttacaacatattgaatactaatgtcactctcgagatatatcctcgttaagattgtatacaaaaatgctaaaaaaaaattatatgatcttatacgaaggtcaatgcgttaaatatttcgatattcataagaataatcttatcactcaatacatatatagtcatatctcattcaaacagaattacctaacactgtaatctataccaaaaaaatatggtgcagaaacaaattacgaaatttagttctttatgtaaatgtagcattatgctatttaata

SEQ ID NO: 302604 - DNA, 416 bp, Glycine max
  unsure (1)..(416): unsure at all n locations
caagcttcggaagaaagtgatgacgtacaagccctaaaggcatatcttgaaagagccctggtagtcaaagagaagttcaagtccatagccatcacagtctgaagagagtatgatgaactaagggacgtcaatatggccatcgatgaagccttggaatgagaaaccaagatagcccgacaggaaaaacacgaccaacacaagttntgaggggctttatagggcagcaatagtgagctcaagctccgaaaaggtgaaaggaatcatcacgggtcaaaggcatgatcttgaangacgagctanaggcttgccttacgtcgaanagaaatttgtcccaacagttaagcgagactgaagggaatatgtgggccatcatcgatgagtgcaaagagaagttaaatctagcggcgactcacaag

SEQ ID NO: 302605 - DNA, 475 bp, Glycine max
  unsure (1)..(475): unsure at all n locations
gctcctgtgccttcctccaccatgtctaaccccacacctttttctcaccactccacctttggtcctgcaaaaacctggttcgccccatcaccgtctgaggaccccaccggtgccctgttcaaactcactcagacgggttcagtgccaacatacctgaaggagttcgaagacttggctattagaattattggcttgatggcccccttcctgttgagttgcttcatctcnggtttgacaccggagatccgccgcgcagtccaggcccatcagcctatgactgtggaccaggccaccggcctcgcgaagctctaggagcagaagctgtcggactttcgtccaccgtctcgttcgcgtccaccgccactggcccctcttcctttgtgttccaacctgcttccaccgctcttgccattgcgacaaggagtaccacagagggcatcgntgcgcctctcggtttcttctccttatcacggac

SEQ ID NO: 302606 - DNA, 473 bp, Glycine max
  unsure (1)..(473): unsure at all n locations
gggatattntnntgaaaatggttatacaaaaacgatttgttntantaagagatgaaagtcaatttanaaaaaaacagaattaaaaacactattaatccttaaaatttcaatttgataagcaaatttattgtctgaacaagtttgaattaacattttctatttgaaaacttatactcaaaatattcttactgagattttgaaaatataaatttatttataatgttataaaaaaaattaaaattgatctatcaaatgtaattatgagatgattttcctatattttaaattaatataatattcatgcacactntttattgagtatatgtataaagtaattgacaatctatgacaatgtgatctttnttacattgtttgtgtattttaattaaatntacatatgtaatataattaaacattctacaataatntataataataaatacttaagaatgcattaatactaattaagttag

SEQ ID NO: 302607 - DNA, 461 bp, Glycine max
  unsure (1)..(461): unsure at all n locations
tgcacaatctataatttaatgatctgctaatataatatgtattgttagacanttttcgaaggatttactgatccttgttttgtttttaactaatggagcaggttaaagagttccatagaagagatggttttgaggtagcaagtgctgacaagatggctaagtcatgcatggtttattttgaaatgcatctatccctaaggaaaaaaataattacaaaagcttttaatggtagttatagtatctacaaggaaactttntgtaaccaggtctattgcctttntgtttgagtaactggacatgcaggtacaataattgttgttgaagatgacaagggacctgaaagaggaatgccgagcttcaattctgagttacccaattccaattcatggtaaattttgtctttgcaatagttcttggatangcttntcatatgtggaanaatcttgttcatttgtcaatca

SEQ ID NO: 302608 - DNA, 381 bp, Glycine max
  unsure (1)..(381): unsure at all n locations
ntaagtggaaaaccatgatatcttcatatccttaatgtatttggagctttggaattgttttgggaataagtgtgggggaattttgtttcactggataacatgttttgttggctatgattcatgatgtattttgggccatacttgatgtacattttatattggttaaatgttggacatgctaaatgagatgctatttctcanaggctacagagcaaaaaaaaaaaatcgaaagaaaaagaaaagcaataaagttgagtgaataagatcttaaatggcaaaagaatgattagactcttggctctattctttatgtttanaatttatctttagctctttttattcntttttcatttttttcttaatatgcacttattccccatt

SEQ ID NO: 302609 - DNA, 429 bp, Glycine max
  unsure (1)..(429): unsure at all n locations
tcaacccactgataataggacatagactaaaatacagttggtagtattnttaggaattcaattgatatatgatagtggtcaataaacatatatgatttctaanagcttacatgttgacattgactattcagtttatacctatataaattatctaattttggtgagggattgatgttgaattaaaaaaaactaacggaagatgtaaaaaatgaaagttttcttagccaaaaaaagaagtaatccttaatagcatgtagaaatgtgggttttctgtctccgaccgagtttgttttcttctaattggatcaaaatattttaacaaaaattgcattntgtgcacattcatttataatatgtaaaataaataaataaatttaagtctttgcacacattnttcagtcattntttttcaatgtcccttatntttta

SEQ ID NO: 302610 - DNA, 375 bp, Glycine max
  unsure (1)..(375): unsure at all n locations
tatgactcggtcaattgagaattcttgatttacatgtttggaagattgagattcaatgagatatgggtcaaatggattaaggggtgcttgatgtctactanggtatcaatctttgttaatggaagcccaatgttggaatttatggtatcaaaaggattgagacaaggagatcctttagatcccttcttgttcaatgtggttgtggaaggcttatgtgggttgatgaggaaagcattagacaaaaaattagattctagtttcaatgtggggaacaaaggagtgaagataaatatccttcaataggaggacaacacaatcttcatgggagaggctaccttggataatgtcctaaccatcaaaagcattctntgatgc

SEQ ID NO: 302611 - DNA, 445 bp, Glycine max
  unsure (1)..(445): unsure at all n locations
tatattagtaaaataaagaagagaataattagtgctttgaaatagtgtgacctacaacttttaatctttgattatgaagatcattntgtgaaaaagtgagttatgattctctcttgagttcaagaagacactcattcatttaagcacggttcttgcaaaggattgatcgggttgtgtctatcgttgactntattttttcgtgtggtttacaccctattagtttgtgcatgaattactgaaggcatgctggaataggtttttctagtttgggctaaggttaggtttctcttaagttcttattcacaaaggaccctanggttaggtaccttagtctcttttttgggggtaggaactgagattgcttgtgatggtttgtaagaattctatatggatagtgaanatctaattcgggtttggataaataactggatagcttctctaatat

SEQ ID NO: 302612 - DNA, 462 bp, Glycine max
  unsure (1)..(462): unsure at all n locations
tgctaacccatggaagctcctaatatctcttacactttttcgggtgggccattcttggatggccttgattttctcatttctaccaactacaaaacctaagaaaactatattatctacacaaaaggtacacttctctatatttgcatagagggtgtttttcctaaggactgaaagaacttgcctgagatgtcctaagtgatcatctangctcctactgtacactaaaatatcatcaaaataaacaactacaaatctaccttagatcccttaagacatggtgcataagcctcataaaggtgcttggtgcattagtgagcccaaaaggcatccctagccattcatacaaaccanacttggtcttgaaagcggntntctactcatcaccctttttcatcctgatttggtgataaccacttttaagatcaatttttgaaaagatatntgcaccatgcaacccatcaa

SEQ ID NO: 302613 - DNA, 478 bp, Glycine max
  unsure (1)..(478): unsure at all n locations
attcttttgacattgttcaagttcctcttgcatggctgatgtttcctctatggaggggacgcatcactagaaacacggctaggagactcttgaaagattagactagggatgcagaagaaggccttagggttctcatgagccttaggatagattctgggcccatggactaagtatgagcctacttatctttgtacaaattagattatggggtattgctaggggcacccagcaacattactggtgcacccaacaattntttagaattcccaaaatacccatcaccgtatttttttctacaaaaagttggtttatttcattnttgtttacattgttgctttctttgtttctccatggtagtgctgtgcggtatttggagctttgagagagtttanggtgttgttcgcaatcggcaagtgtaccagatcgcacaagtagtataaaatggtaagaatcgagtatcgaactctcggngaacttg

SEQ ID NO: 302614 - DNA, 432 bp, Glycine max
  unsure (1)..(432): unsure at all n locations
tgtagaatggctagacatgatacatgtcanggcttggtttggttcaaggattttatggatgccccacattatttccatgacacaaatgcaaaaaatgatgatttggaaattttatgcaaaactggtcatgcatgcgcctatgcggacgctcaagtgtcaaatttttatggtcatgtgatgctagggctcacgattcatttcctctattctagtcaacccaatatttccaaaatatgttcttttatcaatttgtgcattcctccaagtccatttcgggcgtccggngaaattttcacagcattcacccttcaggtgtagacacgttttttcttcaaaaatcggttatgatcaatgaattttttttcaaagaaaagttggaaatcatctcttttcaaaagcatgtcgatttttagctagacaacttattttctc

SEQ ID NO: 302615 - DNA, 477 bp, Glycine max
  unsure (1)..(477): unsure at all n locations
tcctcttgaacccttaccacccactctgtcatcatgccgatacttaagaaggccaacaggtttagccttctcaatgtattctgaacaaaattcaatggcttcttctgcaatgtacctctcaacaatagatgcttctggatgatatagattctttgtatacccttttaagatcttcatgtatcgctcanacgggtacatccaccgcanataaacaggaccacaacatttgatttgtgtgaccagatgcataatcaagtgaatcatgatgtcaaagaaagcagggggaaaatacatctctaactggcacagtataattgcggcctcattntccaactcatcaaacttgacaggatcaacgactntgctacatatggcatggaagaaaaagcacaggcgagttatggctaacctgacttttgttggcaagatgtctcgtataaccacggctaacaattggtgcatgagcatgtggtaatc

SEQ ID NO: 302616 - DNA, 451 bp, Glycine max
  unsure (1)..(451): unsure at all n locations
tganattgacaacggaagctgtcgaganattcanatgttcataactntngtcaagaaggtcagattcaggcacataatatatcgagacgctngaaattaaataacggaagctgtcgagaaattcaaatgctcattacttttcactcggaggtccgagtcaggcgcataatatatcgagatgctcgaaattgaacaacggaagctctcgagaaattcaaatggtcataacttttgacacggaggtcagcttcaggcgcataatatattgagacgctcgaaattgaacaacagaagctctcgagaaattcaaatggtcataacttttgacccgaaagtcagattcaggcgcataatatatcgagacgctcgaaattgagcaacggaagctctcgagaaattcacatagccataactnttcactcggatgtcagattcaagcgcataatatatc

SEQ ID NO: 302617 - DNA, 459 bp, Glycine max
  unsure (1)..(459): unsure at all n locations
tgtaggattatggtgtacccatcacatatggtactatgtggcggtcgggcgatggtgcaagacaattctccacatccacaaatcacgtataaacccaccatcccctgttgcccacctccaactgagctcacgtactcccacgtagcccttatcctcgttcctctcaacgccgggtccccatcaatcctctcaagctcccacaacatccaagaaattcaacatcccatcatcacaaactaacaaaaccaagcaaaacagggcaaaggcagaaactctgcccaaaacacaactcanaatcacagcttttcacatacaaataccccagtaaaatttccttcattccaattcgttaaccgttggatcgactcgaanattntactaggagtctctagtacataagtctacattntgaccgttgggatctgctagcanacatttagaactcattctgtactactc

SEQ ID NO: 302618 - DNA, 471 bp, Glycine max
  unsure (1)..(471): unsure at all n locations
tgttctgaatcacctttatattctatctcccttgctctttcaactttgtactagtctatatacgatcctttttctcacatcttgactgactcggctatatcatagcaagagtgagtgacaagttagccataatcggggggaaggcgcagaacaagagatttgagctgtgaacaagcaaaacaaggaccaacacctgctaaagttggtgaatatttgactagagagttggccaaagttgttgtatatatctataccgcagctcttcaaagttccacgaaatattgtctatcgaaatagacctacggagtggaagaagaccaaccaaccattcagaaattcagataaaacaagatatgccaatcgccaagtaaaacttgcagtacacgaataaattctctgaagacaacnactatttatatacgacatctagagtttgcaacccatactcatcanataagaatatatactctc

SEQ ID NO: 302619 - DNA, 457 bp, Glycine max
  unsure (1)..(457): unsure at all n locations
tgtctccacatctctatcttcccatntattntctttatcgactctccaactcggactatatcatcctaaaatgcatgcactgaggcactgactcttacatatgctcagtaaacacatccaagaccagggcaaaatgctaggagctcaaaattgacccttaacagaatttaagtaatcctttgacaacccttgatgcaaagctatagttgtatgaaaaactgtcattatcagaaaattataataggatagtcaaatatcctctgtttagttntggttggaacttgctacttagtttgttgaaattactgaccatgacatcttgcttggtattaatgtttatagaananaatgataagtgcaatttcatttccagaagttgtctanaattctcaaatntgtcttccatgttntactcagttcttcaacttctgtaacaatgataaactnttaatctcat

SEQ ID NO: 302620 - DNA, 254 bp, Glycine max
  unsure (1)..(254): unsure at all n locations
cagcctgaatggcgaatggcgcctgatgcggtattttctccttacgcatctgtgcggtatttcacaccgcatatggtgcactctcagtacaatctgctctgatgccgcatagttaagccagccccgacacccgccaacacccgctgacgcgaaccccttgcggncgcatcgaatataactatccttgatgtatgctagtccgacgtaatcaagatgagctcggcttccatcgtcatcgacggcgataacagacg

SEQ ID NO: 302621 - DNA, 460 bp, Glycine max
  unsure (1)..(460): unsure at all n locations
ntgcaagtaattgtaacattaatattgtggcaacctatcattcctatagataagccgctaatggaaaagacagacgagtgtggtttctgactattaatctttctctgtcatgatcagtaatgtaatatgtttgtataatggtttatttcgtggaaatcacaattatttaagcagaataattttttatagtttaaatgactaattattcatttattaatttaactaacattanggtgagaattaagataaatgtgatgcanaaagcaacatatatctaacacaagctgctattattatttttatatataaaaaaaacactgctattagatcatgctggcccattttcaatatgagtttgctttagtcagtgaatcctcctgtatgagtctctgttcaagcgtccacttcataagtaatcatgtcattttctttcaccattggtacgagttagtctttccct

SEQ ID NO: 302622 - DNA, 422 bp, Glycine max
  unsure (1)..(422): unsure at all n locations
tgtagcagggtaattattatggttaatggttggactatattgtgagatacattgcaagctgtctataacaatagttnttgttagtataatataatattaatatgatatgaagaataataatgtataaatgaattacaaattagaaattacaaatctgtattaagtattaccattagtagctgaacgttgtctttttagttgttgtaaaatagttttcctacgcttccttcgttcaacatatttgtccatgagtagttcgatttctgcaacaattggcttataattgctaaacaacaccaaaatcaaatgttgaaactgagttaaataagttgctgtaataggttgactttgaaatgataccaacattatagttatttgcatttgcatgagcgaagtaagagatatgtatttgcaatcgaaaa

SEQ ID NO: 302623 - DNA, 444 bp, Glycine max
  unsure (1)..(444): unsure at all n locations
ntagctntgtccncaaggcttcatgtagactggtcctttatcgcgaagtgaacctcggatccctgtcagatacaatactagaaggaattccatgcaaccttattacttccttgatgtacaactccactagcttctccattctatacttcatattcactgggataaaatgagcagatttggtgagtcgatctactataacccacacagcatcatgtccacgactagtcttgggtaaactagatacaaaatccatagatatgctctcccatttccattctggaatttccaatggcttcaattctcttgatggtcgctggtgctcaaccttagccttttgacatgtcaaacatcttgctacatattcagctacatctttcttcatgccatgccaccaaaaacttctcttcaaatcttggacatcttagtcattcctggatggaaact

SEQ ID NO: 302624 - DNA, 109 bp, Glycine max
agccctttcattttattagatgtcgctcgtcatgaaattggtcgatgcaaaattcgacattgggtcatacataactaaaactgatgatctaagacctcaatctaagatt

SEQ ID NO: 302625 - DNA, 406 bp, Glycine max
  unsure (1)..(406): unsure at all n locations
agctttgcatattatcaataaaattgatatgctatcttcaaatcacaaacatccaattgtgctacatctctagttgtcattgcatgaatgtcaaactttctaatattaacaagatgatttatacttatagcatcttctgcataaaaaccaccacttcttccacatctaatactatcaaaatcataatcctcttccaccttatactcaatcgacttctcatcttccttattgtcattgtcatcatcttcaactntatcctctccatcttnatgcataaatacattaccatacgcatcacccaacacataaaacgaagctcccaaatcgccgaataacccttctcctactattatgncctncaaaccctacaaaataacacatttcaaaacataaataaatacatagc

SEQ ID NO: 302626 - DNA, 484 bp, Glycine max
  unsure (1)..(484): unsure at all n locations
actcaagctngaaaacaaaatttgctattaatttctattgctacaactttcataagtgatgatggctacttgcacacacatntgaggagtgtgcatttgttactcttaacgaaagaatcgccattcccttctcccttgaatagctcctcgctgcttctttctttgtctggaccaaaaacgtaatntgctttgctaaatcttacaagtttcctttacattttccattttgtctattatgcgttaataacttattgattaatttgcactgatttgatcatggggacatgtattaaacgatgtggattacatagttatatatcccatatcgacggtattataacatatgacgatttatgctgtttaagacactaaccatattgattatacgtatagcatagaacactatcattattcgaattccggaccacgatgcacatacctcccttatatacatcactaatctacttgttttaactattacatg

SEQ ID NO: 302627 - DNA, 401 bp, Glycine max
  unsure (1)..(401): unsure at all n locations
agctttaccagttatcaaccattctctgcctatggcgaaagccatggcctctacacagatggacgacaatgtagcattttttgagtaagcaactaactgagcttgcagagatgcttaccaacagacaacaatgcttgaagaacatcaaaaattgattacagatctgcgaacacaaaaggatgatgcacacaacgaacattcaaaaacactgcaacgcaagggggattcactgcgaaagaaaaagtgcacagacnacaaatttaacaaattcaatctccattttctattgaagtccagaatgagagaatctctgaccactatcatcacgagtaactcgtgttcacaaacagtttttacaacatatgtcttacgaggactctgtcatgttattaatacagata

SEQ ID NO: 302628 - DNA, 422 bp, Glycine max
actcaagcttgtataaatatagtgtgcctttatctaaagccaacttatataaatattgtgtgcttttattcacttgcactttcattcttctccaatcttattttcatccaacctaagtttcctcacgaagctttttttgtttgtctacatcccacttttttcatccttctatccatctcttgtttcttgcattgtgaaccaatggtacatgcacaacctagacctattgatgacttgttgttaaacttacaagacaatcatatttcgaatcaagtgtgagaaggccaagagagaatgatttgtctaaggtataatactatttgggcttttacacacttagatcggatagataattgtgtcaaagacctaatcgctgtagctgattctgctcatgttataaatgctggaaaaattgatattaa

SEQ ID NO: 302629 - DNA, 230 bp, Glycine max
tatacaggcatgccacactgtctgaggactactatcatcaaatgcctcatacaatggagcttcgacaatctgcaaaggttgaaatgcattgcgcattcttgccaattccaatgacactggcttgatacgacaaaaatagttactaaatatgatttttagctactcaaaaactctcataactagcatatttactgaaaattgatcacaacgtgaacattgagaactttgtt

SEQ ID NO: 302630 - DNA, 237 bp, Glycine max
tatctcaggcactactctgggtcaaaataaagaaggaagtctcacctgtaaacgtgctcatctctagcttgcaggactatggggtcacataacatgttgactaggtggcgggccgcgatggtgacaacaagcctacaattcaaatgcgtgcatacccacacatccctgttgtcactaaacgatctacctctccaataaacatatctcgcttttcttaccggacccataatctccaac

SEQ ID NO: 302631 - DNA, 458 bp, Glycine max
  unsure (1)..(458): unsure at all n locations
tcttatccaggcaattcttggtggtgaagctccttcttccttggcttattccctagtggatggtgcctcccctctcctcttctcctttgccttccgctgcatctccatagtgtaaaatcaccattgaaggacctcattgaagctcaaagatccagcctccatagcagctccacaagcaagcttccatcaaaatggctttgggatggtagcctcagatgactcatcctccatatgctgaggtacctgngctgtgggaccttcgtcttccttgtgaagagaangttgggtcccaggccaggctaccatctcattaaactggtctactgaagggatagagttttgaggtgccaccatatataaacattgcagtaaaatgatctgtccctgatgaatgctctgaagcatagtgtcacaacctacccttcngcgggagggcgacacgaaggctcacgggtgca

SEQ ID NO: 302632 - DNA, 492 bp, Glycine max
  unsure (1)..(492): unsure at all n locations
acgcgcgctgtactggaacatcacgatatnggcgaanccactcggactcgccatactcagagccagctgaggccttaagctttttttgctggaagaaacaggtactaaacgaacgtacgcatcctgacatttgccctaatttgaaattataatagaacaattaatgacaactatctacgtcatctcctgtcctaaagttagtggtaactgaactggtatcccgttcgatttacaaattactcttgactcatgtcaacatcagcaatgttagtctccattattgtaacgctaatgcatatacgttaaatatattccaatgaacgctaaacattagcatatttacactaatatctnttgatctttaatgcctggatcactacgactgagatattaaacaaggatatattcgaccagatactattaattcaactttgaaactntaacatattaattgctttgagatantaacaacacactaagacatctcnatct

SEQ ID NO: 302633 - DNA, 364 bp, Glycine max
  unsure (1)..(364): unsure at all n locations
actcagctttcaaataagtttttcataataatttgtactatttacatantacacattctttaaatagtccttacacccatcgccataacttataatatcataaatgaaaaggattatcaacacccatttacatatttagaaaaggatctagtaaaaacaatcacttttccattcattggagacatatttaaattacacttagacatttccttatgctttgttgaattacacaaaatatttttattttactcttacaatgacttctcttatagatggatacatgtgtaatatttnttacaccttaaagagagagagtgtataacgcaaaaagaacagtcaatatactgtttttaaaacaattata

SEQ ID NO: 302634 - DNA, 311 bp, Glycine max
  unsure (1)..(311): unsure at all n locations
tctgctttataagtgcgggtctgggagacgaatgtcaagtggttgcaatatgtgaagatgatgttccaagaactctcggatctggtccgaccatgcccatctgatttccagctgggaaattggcgagcggaggaacgccccggcatttacgcaacgagcataatgtaaacctttacagttttaacagctctatagttgggcctaagctttacagtttctattttcgtaaggctttgtgtcttttgtccttgaatttataatacaaggatctttcttcatntgtccctggnctctacccattctcattcatt

SEQ ID NO: 302635 - DNA, 264 bp, Glycine max
gtgaataaccagaatagctcgtactagtaattcaaagaatcagcaacgtacctcagcaggccaggcatcagactcctgtaaactcacatttgtctccaactgtctgaattaaagaactccaatccatcaccacttggcccagccatttgatctttctttctactacactttaaatttggtataactttattcaactatgattatatcagaacctaacacgttttgcttcacttcaccaaattgatactcccttgctttctcctc

SEQ ID NO: 302636 - DNA, 418 bp, Glycine max
  unsure (1)..(418): unsure at all n locations
tatacaaactcaagcttgaattaaagtatctgaaccttcatgttacacagnttgntccttaatgagctggttgcaaaaattggcaaactgactattcacctacccatgcaacttcaataccacctaatgatcatgtctatttggattttgaatccccatcaccataaacagatcccacacttgctgggctttaatacaaccttcgcaacaatagcccatatgaatgcctttcccacataaattttgaacgttgagcacccatgctcaagaccttgttcgccaacccaaccacataccatataccacatctcctcaaatttgatatgcctttgttgggtcaaaacattatcaactacgtccaattatgaagtgactcctttaactagcatcaagtccttggtagtcacttttctatcca

SEQ ID NO: 302637 - DNA, 358 bp, Glycine max
ctactcgatacgtgctatgcacccgcagttgtgcacattgtgatgctcgcatgaatattcccggagcgtctagtgttcatagccgatcttgacgagcttatacgctcctacttaagacattcctcggataagttatgaacataagaaattctcaccgaccgccggagttatattatccgcgaacttctgtgagaatcacttccgaccgacctggcgtgccgtagccacgacggtaagcatttagaggaacctactagtgtaataatcaaacagacatcttttagtaaaatcccgcggagaatcaatcggacgatgtctctgtgcgatttcatattcttaaacgaattgatgaataact

SEQ ID NO: 302638 - DNA, 488 bp, Glycine max
cgccggtccgtgagctttgaacatgatacaaggcgatctactgtaccgggagctctaagcttattgcgtgtatgcacgctttgtaatggccgagacatggatggctcgatcccttcgagctctaaccaaaatcatgccttcgcctgccaagaaaagatgtgatattacagcggtagaacgtgactaatctatagcatgtaggactatttagtaccctaaacatgtcgacctggctggcagggcctccacatagcataacggagatacaacatctccatttttgacatcactacaacgaaagatgtggctgcggtaaaacctatttcacattctctaacaatacccacatcttccacatttcattatccgagacacccataatcctgcaaaactgcatcactgacctttcatacgctcctctgcccacaccatctttgcacactaccttcttacgcacacggctggagccactggaccattcgcttccg

SEQ ID NO: 302639 - DNA, 381 bp, Glycine max
  unsure (1)..(381): unsure at all n locations
tttaactcgaaaggccctcatagacttttttgagatgtttatggatgtctgaaatgaaaataaaaggccatattggattagagatcatgtatggaacgatatgttatcacattggaatgcacctgngaacctttccaagtgtgcataggcaaaaaaaaaaaaaaattagacatctaaaaaggtggatgtatgcacacaggtggttctatcagccttcgggatcacgtcattcgcttggtatgtacattaaaattataatacatatttctttgtattgtttaacttacttcttaatgtttattttataatgtttgttaataatagtcacaagagtttggtcgatctgcatacatagatgaggtctttcagcacactcattta

SEQ ID NO: 302640 - DNA, 402 bp, Glycine max
  unsure (1)..(402): unsure at all n locations
attaagagacttcctcccgaagcttcctcgtggattctttgagaagctacacccttatctatccacacccctcttttaacttacttaacctccttcaaaataattacggatgacaataacgcaacaaataatcaaacatcaagcctaatcactaataatatatatatatatatatatatatatatatatatatatatatatatatatctctatatctatctatatctatctatctctgcatcccccccgcgatccctcttctctcntccatctccctacactctctcttccacatagtcatcatatcctctcatacatcgcccaacataccgccacctccgcctgcggacaccaccctgtgtcctctcatccgcttgtatccctactcttctctactcaccc

SEQ ID NO: 302641 - DNA, 430 bp, Glycine max
  unsure (1)..(430): unsure at all n locations
ctataaaactaagcttctcgggccattcctgttattgcaaacatttggaatgntagctctaccagtgggacattactcttaaaacaaaaatggcatataacctcctcccacaaatacaaacatcaatgtaaatttagagcaagcttatgcgcatatttccttacaatcgttctcttgcacaagacaaaaaaaaaatgcacccatatacaatcaaggcagcttcgttacctagattatttacacgtacttccaaagtgtatttgttacttacatcacacacatcttcttggctaaattcacatacatgcatactctaagcattttgnggtaccacaaattgcacctgtgcacatcttggtatttctaatacctatacatacacaaacttcatgatgaatcttgactatctacacaataaagtgctacatct

SEQ ID NO: 302642 - DNA, 398 bp, Glycine max
agctttgagccacagtcccaactcaccataaactcttccctcacaaggaaacacaatacacaggagaaagacgaaaggagacaaggagaaaattcccaatcaaagagtgggagaaagcacataaaaagactagacagaaagttcccaatcaaagagtgggagacagcacaaacgaaaagaaggaaaattcccaaatcaaagagtacgaacacgaaaagaaaggagagacaattcccgatcaatgatcgaaagacaacagaagaaatatgcataacggtcttttacaccagaccacatctgaacaaatacagagttactaccaagtagacacaaaagaaggcggggaaaaccatgacctgaagcggtcctccttctttgattgccaaccacaatcctgt

SEQ ID NO: 302643 - DNA, 400 bp, Glycine max
  unsure (1)..(400): unsure at all n locations
ntgtagcataaggactaatgtttgcgagctttggactattcggtcctatggttgctgacggaggagctggagtggatgatgnaaggatttcatctgctctagccctttntctcgatgccatctgtgactaaaaagaactcanaattgcttagaccaaatttatttaagtttaaaaatagatgggtgcttagcgggatatagattgctcagcgcgcccttagaaatatagcatatcgacttaacgaaatagtgtgtgcttcagcctaatcaacaccgcaacaaatatgtgctaagctcagtanggttgcgcttagcagcaccaagaaattctgaaaattcactaagtatgagggcttagcgagccagacacgcttagcccaatgatttccgtaacgaaatg

SEQ ID NO: 302644 - DNA, 364 bp, Glycine max
agctttcatcacttattccgcaccagcatgattggagtaccgaccttaagtgttaatttgtgattaggtatccctgatgttttcaatgagtttagaaatttacgtgtcagtaatccgaaagtaggattgagtagttcatcttatttatcaatgttatcagtgctacaatactccttttcgtcattgggtatcaatgataagacaataatttattttgtcaacaatatcttttttagaggcaagaacaactcttttttgcaagtaatctgcgttgctatagttatgtgtcaagttgggatatgttgcatcaacaattgcctggataggatcagtatagtcctttataaggaactcatctgggatg

SEQ ID NO: 302645 - DNA, 418 bp, Glycine max
  unsure (1)..(418): unsure at all n locations
tatgcacggaanatgtaattatgaaattgagatgccctgtgaaacaccatttcctagttaaccatgcattaggtaccatgttcaattattttgtttttaagtgaaacgggtttatgatcccaacatggttggctcgtggtgcctaacacatgaaactaagaatgtagtgtgaagtttcacgcttcccccttttttgtttttgttttgtagaggaaaacgcaaggatgagcaaacatgaaaacaaatggtatgcaattttgcagatcaaaaagtttgttgaacgcatatgcatgatgatgccatgactcatgcaaaatgtgaggctggaatatgataacggacaaatgcaggatatgtccattatgatgttatgaagagatgcttatgcgatgcatgatatgaatgcattttacggaca

SEQ ID NO: 302646 - DNA, 424 bp, Glycine max
  unsure (1)..(424): unsure at all n locations
agcttatgcgcatatttccttacgaacgttcgcttgcacaagacattcttttaactaagaaaaatgcacccatatacaatcaaggcagcttcgttacctagattatttacatgtacttccaaggtgtatttattacttacatcacacacatctccttggctaaatttacatacatgcatactcaaagcattttggggtaccaaaaattgcacatgtgcacatcttggtatttctaatacctatacatacacaaacttcatgatgaatatcgactatctacacaataaagtgctacatttcatgctcttttcaagtttttgctacctaaagccgcatgcaaattcaagtatattttcctttgctgactaanattgtagtaaaaggtatatattctttctgtaatgtattttctttacataacatg

SEQ ID NO: 302647 - DNA, 466 bp, Glycine max
  unsure (1)..(466): unsure at all n locations
ctaagcttaacatcagaccacttccagggtgctggaactacttttatggacttgatggngcccatgcaagttgaaagccttggaggaaagaggtatgcctatgttgttgtggatgatttctccagatttacctgggtcaactttatcagagagaaatcagacacctttgaagtattcaaagagttgagtctaagacttcaaagagaaaaagactgtgtcatcaagagaattangagtgaccatggcagagagtttgaaaacagtaagtttactaaattctgcacatctgaaggcatcactcatgagttctctgcagccattacaccacaacaaaatggcatagttgaaaggaaaaacaggactttgcaggaagctgctanggtcatgcttcatgccanagaacttccctataatctctgggctgaagccatgaacacagcatgctatatncacaacagagtcacac

SEQ ID NO: 302648 - DNA, 466 bp, Glycine max
  unsure (1)..(466): unsure at all n locations
ccgcgccgtgtcttgaccttaggggattgactgctaccgggatcttaagcgactgggcagcggctttgaggcttgagcattcgatgaacacgnacctgtagtcgatgagaggcatgctcatgcatgtgaagaaacttatctaactgagaattgtgtctatagacttgccatgatgatgcttgatgcacgacatatcctacttacagtatgacagatgacctcagggatgatccatgataaatgccgctcatgggagcggggcatgttaccgactagacttcgcgaggcttcttgcagctttaccttgatctctaagctctcgcctttctgatgtccaccatgttgctcatgtcgctaatctcatggcgctcgcagtatctctaacatatactaggttatcgtgctgagacgtataataacaatcctataagctgtcatgacgtatatcgaagatgactacacctcg

SEQ ID NO: 302649 - DNA, 452 bp, Glycine max
  unsure (1)..(452): unsure at all n locations
tcttatccaagactcatcttggtggtgaagctccttcttccaaggcttattccctagtggatggcgcctnctctcacctcttctcctttgtcttccgctgcatctccatggtggaaaatcaccattacaagacctcattgaagctcaaagattcagccttcataaaagccccacaagcaagcttccatcacttatcatattgccttgtatgtcttatgcatcatatcatattgtcattgtgaaaacaacttttcccgacaaaattttcgttgtaagtcgctgcctacaagtccattgctaaaagtttctacaacgacattacaatttgttgacattacttatgttttaacaatgataattatcgccattattttcacacaattgttgctaccataagtaatttgtagtagccattgaagttattgttgtatttacaggccttaacaactaac

SEQ ID NO: 302650 - DNA, 259 bp, Glycine max
  unsure (1)..(259): unsure at all n locations
agcatctcntacttcgacatcaatggcggacaggacagcggtgcttacctcgacggtcgacgctgacgatgatccctcgacggtggacggcgcgctcgctggctcgcgcgctcctcttcaccgcggctcgcggcttcgggctgctcgcgcttcgtcgatcgcggctgacgaagaacacgaagaatcaaacggagaacaacaaaaaggcaccgcgaggaagaagaagaatggctctggggaagaatcaaacgctccgcgg

SEQ ID NO: 302651 - DNA, 453 bp, Glycine max
  unsure (1)..(453): unsure at all n locations
actcagctttatcctggcttctatggtggtgagcttgtctttactctctttttcttgaagcgacgtctccaatcatctttcttcttatccattccactgacattgatcttcaagaagaaaaggactccattgatgaagaagatccacggcctacaagctccacatggagctacatcataaaaagctatgtcttaagctcatgtgctacttcatcgccatccgatacctaaagtagtgaaacccctttgtgacaacaaaatatgcttttgttgagaataattgttgaggagttagccctcacagtaatggataaccacaaattggtacttgcgagatgatcttaaggttgtataaccttggagggagcgactntaagtcatgacgatagttcacatagatgacttggtaaccctgacaaatatataagccatcctcagatggtgagagccgtca

SEQ ID NO: 302652 - DNA, 325 bp, Glycine max
agctttataactttaattaaaatgtccacaaactgctggtaatcgataccatatatgtgaatcgatacacaggcaatttgaattcaaatttaatagctgttgtaaatccagttctggccattggcaatcgattacatcctctggtaatcgactaccagagagtaaatttgtttgacacagactttttaacttagatttcttggcccaaccttttgctactccaattggaattcacttcctatctaatataccctttctaagactctagagactgtcttgatcatccatcttgaatatcttaactcctttgcttgaataaactttg

SEQ ID NO: 302653 - DNA, 446 bp, Glycine max
  unsure (1)..(446): unsure at all n locations
agctntaccttagtttcgttgcttacagaanaataaaataattcctatggttggaggattgtgaaatgacatttagaaagttaaaggagtttctttccactcctcctatcttgacaaagcccaagtcagggttgcccattataaaatacttgtcggtcttcgagcatgtcgtcagctcagttctagtacaggaatttggagttgaataaaagccaaattattttgtgaaccgggtgccttttggtttcgagattaggtatcaaagttagagaaattggcattggcagtacggatcacagctagaaagttaaagcattattttcatagttacccaattataatttgaaccaattaatctatcaaaacaaattntacagaaacaggatcttgttgatcagatgatgaagtggttgttgaactctcagagtttggtatatcgtttgaaa

SEQ ID NO: 302654 - DNA, 380 bp, Glycine max
  unsure (1)..(380): unsure at all n locations
taagctttaagcagattntagtaatgaggcactagactagaattaaaataacttaatgccattaacctatggaattaacaaaaacttaatggctgagtgtaactgacattgcggcaaccaagagtcacccccaacagccaacaagtcagccaccatttggtctcccaaaaggctgatgcctaggttgccaattgcgcccttattacaacttgaactaaacctaactaaagcccttttagttgatcaacccataacatattattggccacccaactttacaaggattgcgccattatctagacaaactaaacactctaaaattgagacaaggtggtgtcatttacgcctcctccatttgcgccatgatacaactcacaacc

SEQ ID NO: 302655 - DNA, 346 bp, Glycine max
aatcaaaagatgcaactcttcaaatgatctttgacttattcaaattggttctaattttttctaaaagttataactcttctaaatggtcctcttgaccagacatgaagagtctataaaagcaaggctttgtttttcattgtcaatcaatctttctaacacttattcatacaatcatttacaagccttgaatctctttgaacttctttttcttctttgtaccaaaagctttccaaagttttctggttttctaaaccttgaaaacttgtgctattcattcttttcatctattctccctttgccaacaagacttcaccaaggactaaccgcctgaattctttctgtgtct

SEQ ID NO: 302656 - DNA, 336 bp, Glycine max
tacgctttcacatacaccgatggtattgatctttctgcatccgatgatgaagatgatgatctctcggaagacgacgaagccaaaaggtccagtcagcagcagcaaaggcctgtttcgaagccacttgatgtgcatattgctgagaacgagttgactaagcgtgacaagcaagatcttttagcaccacatgttgctgagcaggcaaagaaggacgctctcaaggatgatcacgatgctatcactgtggtcattggaagccgcgcttcggtgctcgatggacgagatgatgctgatgctcatgtcacagatataacagtagacaatttctccgtgtct

SEQ ID NO: 302657 - DNA, 413 bp, Glycine max
  unsure (1)..(413): unsure at all n locations
tgtaatctggcttcttttaagtcatcatcatgattagtcagattatagccgcattattggtgcgtgctagtgtgctatataactagagagttctcattgtccacttcttttgactttnttcgtacccatccactatagctagcactaattctatattctcctaggtttgaaacttaactttaaatcatgaagtcagccatccattgtttgattntttttatactaaaacacatttttgagtcaaataaaattattataagtaacaatttttttaattaaattaaaataattntgtcaaataattcatatgtctgatttgattattataattaatgtccttggctcaacaaagattatgacaaagcactttanaaagccaggttatactcacatccaaagcatgaccaaaatag

SEQ ID NO: 302658 - DNA, 298 bp, Glycine max
agcttggagccggtcaaaatgccacagtagctgtaatgagctatagtggttatgatatacaagatgccattgcgatgaacaaggcatctcttgatcgctggtctgcgccctgtattgttatgaacaagcatgtcattttattcggcgattttatgcttttggttgccttatattttattgtctacgctttttaacgcagcatttctgatcttgaccttccctgctgtataggtataatgccatcatctacaaccattcgaatgacacatcataccgaatacttacgcctaatacaact

SEQ ID NO: 302659 - DNA, 438 bp, Glycine max
  unsure (1)..(438): unsure at all n locations
ntggcacacagctaatcattaccttcttcatggaattatggtaaacacagttctatcacacaataaaaaaagtgtcatataacctgcttaccgtctctcttgattttggtcgaagaccatgccattttggaattgcatgtgcactctctacataagctgcatttgttccagtaccaacaatcactccagcaacaacatcctgattgctgaatcttgctctagctactgttccgactgtgtcattaacctanatcacatcaccaagttntgtctctggttcaagacattaagtaaccaggaaatttaaaagaaaaaaaattgaaactacaaaactcattgatctaaattntccgccatatagaaactgaannatattctcanagccagactanaggggaaaaagaaaacaagacaaacaggaagagaagtacactgact

SEQ ID NO: 302660 - DNA, 486 bp, Glycine max
  unsure (1)..(486): unsure at all n locations
nacgacgcgntgacgctgaggcntcttganactttgcaanccagctcgtacccgggatcctcagagtaacctgcagcattcagcttttcccctatttttataaggagggggagaattgaagtggactctggtccatcccactgagcccttgtctctgtctcgaacttggttagaaacatcgtttccgcgaagagaagccaagcctatgccactccgaagcgcttccgtgagcgatcacgcaaaggtagtgacgcgttcttcgacagtattgattacgacttcctcggcctctgagcctcaacggcgaagtactctcgacccggctcttcgagacatctatgtacccgaggtgagtcacaccgagcccctcgcatttctctatctcgcttagtagagctttacgatacaccgttgacgcgcttacgacacgacattgaagccgtatctctgctatcccactaataagatagtgatccaccgatcgcg

SEQ ID NO: 302661 - DNA, 450 bp, Glycine max
  unsure (1)..(450): unsure at all n locations
ggacctataaaactcagcttaagaaaaaatggcctcagcaagcttttatnttttaaagttattcaacaaaggcctccatctttatggagagggtaccactactggaaaacccaaatgcaaatttttatcgaggcaatagacttacatatttgggaagccatagaaatagggccttatatacccaccacagtagacagaattacaatagatggaagcacatcaagtgaaagcataacaatacaaaaacctactgatagatggtctgaagaggataaaagatgagtacaatacaatttaaaagccaaaagtataattacatctgccctgggaatggatgaatatttcacggtttcaaattgtaagagtgctaaggaaatgtgggacactctacaattaacacatgaaggaacaatagatgttaaaagatctacgataaacacattaactcat

SEQ ID NO: 302662 - DNA, 446 bp, Glycine max
  unsure (1)..(446): unsure at all n locations
ggacctataaaactcagctttacttggtgattgtgaagttttgaaaaattatttctgcctatgccgagtataacattttctgtttataacttattgatgtattaattgcattgatcatcactgaaaaatgttagattttggtgtctcatttcttgtttttataatgattgccaggatcactattttgatgtgataaccaacatagttggtttggttgctgctgtcctacgtgataaatttacttggtggattgaccctattggcgctattttgcttgcactctacacaatttcaaattggtctaaaacagtgcttgaaaatgctaggtctctctttctctcttcttattctgcgtcttatgctttgttcaattacgtactctatttaaatgatggttacctcttggnttagtttccttggttggacaatcagctccacctgaagtc

SEQ ID NO: 302663 - DNA, 369 bp, Glycine max
agcttgaataagtagcagcaccacaccctcaacacctttatgcctattcagatgaaagcttgttcctttcaaacacgctttttgagaactacattgacccaactggtggttttctttatcctacaaagatcaaccctcattatgattcattcactcatcgtgatgacattcttccaactaatgaagaaaacaaactactcccatgtccagaacgccaaaagtcctcctacgaggaaacaaaatgtactcttcactgcaagagtttactaaacacaaataccatccaatttcttacatgggtttgttgtgccttatgataattgttgttccttgcaagcagaggaactgcaacagcaactcttctatgag

SEQ ID NO: 302664 - DNA, 437 bp, Glycine max
  unsure (1)..(437): unsure at all n locations
nttatgtcttgctaatgttaatagatattacctatctattaaagccaagtcatggcttaaggcctgtatcaatcctattctcttctaaatcatgacaagaatgataacaacaaaactaaccataatctcatagttatgaacatgatatattntctttgacagtacatttgttccccttataaaattctctataacagttgttgttcatatggtttctgtggcatgcccttcagaatgcttttgcaaccagtcttcaatattgtatttcctaaggtaggaatagtgcataccacttctgagttgatctctgttatcattcacaggttntattcttccagttagatagttattcagtgacttggttaaggccctttggcaagtaactggggagctctctcaatgcaatatcataattntaagcagttaatactatgtga

SEQ ID NO: 302665 - DNA, 445 bp, Glycine max
acgccggtgccttacatcagcctggacgtcccgcatctctaagcactgacgatgccgcttataaactatatccatattctgtgggtcattcaccttaaaaattcttttatccatctcctatactcccttattcctatcctattctgaatcactatgacaaatgatattatataacgtctcatgcatgaagaactgcacacccataacatatattgggcctgattacccataacctacaacggcgatgtcacccctccacctccactgtcccccacgctcaccccatataccgcgacccctgcgctctcgccccccccccacctccctcgctcccatccccccgccaccctcccgttcccgtcgctcccagcccacccccactcccccccctccccccctccacacccctcgcccccccccgctccgcacccttcccctcccccct

SEQ ID NO: 302666 - DNA, 425 bp, Glycine max
  unsure (1)..(425): unsure at all n locations
agaactgcttcttcctgantatttgatccatctctcttttcaccactatgaaaccattttcaactgttggcaatgacgagctattatttctattatttaaaagttcatactgcaaagagtcttggacactacgaagctgttccaatacttcttgcacaaattcaacatctaatccaaatctatcctgctccaaccattttcccaatgccacgtagataccttccagatcattgtctgaataaattacatctgggatgccaactgaaccaagagaaccacaaaatttatccaacgaagtacagtatgtatcactttttccattccttaaatcccacttatcaacatggttacaatagaacttgagagttcctttcagttttaagatatccttgcaagcattaactagcttttgagaaataactctc

SEQ ID NO: 302667 - DNA, 418 bp, Glycine max
  unsure (1)..(418): unsure at all n locations
agctttctcggttccatttcctgcgaaggcaaacatttggaaagttagttctaccagtgggacactactcttaaaacaaaaatggcatacaacctcctcccataaatacaaacatcaatgtaaatttagagcaagcttatgcgcctatttccttacgaacgttcacttgcacaagacatcctattaactaagacaaatgcacccatatacaatcaaggcagcttccttacctagattatttacatgtacttccaaggtgtatttgttatttacatcaccacgctctcttggctaaatctacatacatgcatactcanagcactntgnggtaccaaaaattgcacatgtgcacatcttggtatttctaatacctatacatacacacacttcatgatgaatcttgactatctacacaata

SEQ ID NO: 302668 - DNA, 451 bp, Glycine max
  unsure (1)..(451): unsure at all n locations
tgatattgaaagagaanttgttctacattctatatttattgntttgctcatcaacttcaatgagttcttgttacattggcaaaaaaacatgttcaaattgcattaattgttattcaatttagttgctaatttgtctaatattgttggagcatcatgtaagcactgngatatttttcgaaaaagtcaaattacaatagtgaaagaagcattgcaaaaaggagaaatctcaagtgagcatgacttgaatcaagagagcaggaaacactaaatgaagctcacattatggtacattacttagtttagtttctcttttttcttccatgattgatgtgcttgaaataattgaagaagatgacataagtttagagcanaaggctaaaatatgtgctttngtaaattctgtgcaagcttttgaatntgttttcatcttgcacttgatgaaaaatattct

SEQ ID NO: 302669 - DNA, 347 bp, Glycine max
agcttattaatgtccttaccgtttcacattgagcatgtatgacaccagtgactgatatgatgtgcaaagctgggactcttactatccagttgttataactcacacactcttaccttgacagtggtgggattaagagaaacactatcacttgtgaggactgaagattggcgattattgcttgcgatatgtcattcttgctaaccatttcattagacgcgcgtcctattctgctactttcatgatcctatgacaactgtgaacttgagaactgtccaatccagctctctacaacgcatgccgctatctcatgagtgttgattgggcaactctataacttttgcttctgc

SEQ ID NO: 302670 - DNA, 451 bp, Glycine max
  unsure (1)..(451): unsure at all n locations
tattgganatgaatcatatctcattctctgttttcatgccttggattttatntgtaaatgaattaagcagcttgttgaataatgagtctgttatttacttcatattaattttacgtgtcatttgctgcagactgattgggagggtggctacttcccgcttacgctgcactttagtgaagactacccaagcaagcctccaaagtgtaaattcccacaaggtttcttccaccctaatgtttatccttctgggactgtttgcttgtctatacttaatgaggatagtgtaagtacatctctcttgataattgcatgactgcttgaaaccaatntattttttgtgatattacatgctaagcaaacagttaagaattataggtttattgttctatacaggggtggagaccagccataacagttaagcanattcttgtgggcatccaagacttacttg

SEQ ID NO: 302671 - DNA, 103 bp, Glycine max
agagggtgactactactggaaccccctattgcctatattcaccgccgttgcctatttagctgtctgtgaagccatagcaatacggcctcatataccttccata

SEQ ID NO: 302672 - DNA, 453 bp, Glycine max
  unsure (1)..(453): unsure at all n locations
ttgtgtgattctataatcgattaccatatgtggcaatctgattaccgttttagcacaaaagaaataaagatacttagacagaaaaaaattaaatgattactccatttgataattgattgcccagtttatggaaatgcagaacaaagggtattttgacgaattaatcgatttcctaattctataatcaattagatctattctatttgtaaaaaaattataaatacttgttgcaacctacctcacgacgggatgacaaaagaaaataaagaataagcatgtttgtctcctaaggagaaaatgagtggagtcgtcaccaacatttatttaaggaaaaatattagaaaaaccaaaaagaggtttgcgaatnttgaaaagaacggttcgagagttgtttatgtatagggaatgtattagcaccccatgcgcccgtcacaagggatgacaaccttcaat

SEQ ID NO: 302673 - DNA, 392 bp, Glycine max
taacttttattccataacgaaattcaataaatacgcctcctatccttaatggagaaagttaccactactgggaacaccgaatgcaaatcttcattgaggcaatagacttacacacttgcgaagccataacagtaggaccttatgtacccaccatggtggctggaaatgcaacaatagaaaaacctagagaagagtggactaaagatgaacgactattagtgcagtacaatttaaaggctaaaaacatcattacttctaccctacgacatgatgaatactttacggtttcacattgtaagaatgataaggatatgtgggacactctacaagctacacatgacggaacaactgatgtcaaacgatctacgataaatactttaactcatgagtat

SEQ ID NO: 302674 - DNA, 460 bp, Glycine max
  unsure (1)..(460): unsure at all n locations
tgaagcggaaatgcccaaaaaaccaataaattactactaattaattgattgtgttaagatttgactgttggaactgcctaacaaattatagtagataagatttttatgctatttttaaggaaaaaataaaagtcatgttgactgataggataaagcagttttgatcctattctctangcatgatttgttagtggtgttatctttctgttagtgatgttatctttntgttagcagttattatcttttccatgcttttaaatacgttgcttcatatcagaataaagtaagcctttgcagtctcaatttctttctttatgctcccttttattgtttaatatttctgcctactcttattaaaaaaaaacaacaaattggtatctagagctcttatctttaagggatctgtgagttgagagaaatcacaatggagggagaaacatcatacacagcaagttcacca

SEQ ID NO: 302675 - DNA, 315 bp, Glycine max
aaagtacatatttacatacatacatatatatatatatataactcagatatgaaaaaattcctcggataaaccttatatatttttactcgagacaacatttattatacatactatgaatgacatgaaaacaattattaacaactaaagaatccacataacattaaataaaaaatacaattatgcttaaactactataaagattaacttcagaacatacaaaataaaaactaatacaaaggtttattctttgtctatgggacatatagctcgaatttctcgtgatttaggagctgcagcaactttgcattccatttg

SEQ ID NO: 302676 - DNA, 445 bp, Glycine max
  unsure (1)..(445): unsure at all n locations
tcagttcanagcattgaataattaaatatttggcatttagcttgtgcacaacacaaggaacttatgcctttgaagggaatggctatagctaaatgggaatccaaatttaatttatcaggtgctctacactagtgaaccaaatcttccacaatccctcaccaccagtgtgaacaaaacattacatcagcgtgtgatgattgttgatgattatgtcattgcctcgacaattgtagtatatacatgtgactcaatcggtagtgtttgattcttccatttcaatttacacgtttattgattttcttctttcataatgcgtgttaatcctaccttctttntgttctgttagcaagcaaaggaaagctaatatactctntctctttgttctttggagaannatggtggaaacaagtcaaccattgtgtcaactcttcacaccccattttac

SEQ ID NO: 302677 - DNA, 414 bp, Glycine max
  unsure (1)..(414): unsure at all n locations
tgtaaagctgactatcttcattccacagtcgattggataatgaagagatctacgcctacttccatanaattgaacatctacccaatcgcggggctcgatacacacaataccttgcaaatgcctagtacggctgactgacaacaatcaatataacatctctcacaagagtcacatgctccatttcagtttggattcattgcttcctttgagttcgccataccttcttgttgtacagataactccacattctcacgattgcaactttaaacaataaaatacccattgtctttcgtggagacgtatattacagcagatcatacaggtgagacaatatagacttaactgacccaacattctatagattatacgtctgttcaaatactcagactttgacccacacctcttgtgagaccg

SEQ ID NO: 302678 - DNA, 445 bp, Glycine max
  unsure (1)..(445): unsure at all n locations
tgtggtcaagtaggttttctcaaaagttgtagacattttgtgctcattcatatcttattcaattattactgcatgaagtttcttggctgcatattgaatctgtttgtttgatggtgagatgattcttaaaaaaaatgattccttgactccaataccataaatttcgtggtggataaccttgcaaactgaagagataagtgtcaagtcgtattattctatcgcgaaacaaaggttgatactggttttaaatagcgtttccgcaactacaattgtagtcacaatgtcaaagtattttgattcatcataatgcaaccacaaccgtaattgcagccgcattagtcacagttttctgcaatataaaggttttctgattcaccacaattgcaactgcgaccacgatngatagtattagttacttgctgttccctgccccaatatagttact

SEQ ID NO: 302679 - DNA, 382 bp, Glycine max
  unsure (1)..(382): unsure at all n locations
cacgatgcttggtagttcgaccatctagaccctttgttgcgcaatcatctgtagaacaaatncacatatccatccgaatacatgaatgagaaaacgttagggctcctatatttattacattggaatctatctaatataccgaaatgatctgtttaataaaatcataaacatattcccaatcttagcaagcatatacgacactgatcttcgactataccaactatgacatagtaactctttcactttctcaaccatatgatctataacatactttgcaagctcacttttgacattacaaaccactccccacgtgaaagtcaagccaccctctgaaagcggaccgtgtgtgacacgtactgaacatatggcgttgccttctccg

SEQ ID NO: 302680 - DNA, 442 bp, Glycine max
  unsure (1)..(442): unsure at all n locations
tctttgagaaaacttccttgagaagctagagcttagttacacacacccctctcataacaaagctcacctccttgagaagcttccttaagaagattcctaaagaagctagagcttagctatacatacctctctaatagctaagctcacctccttgagatgagaagctagaacttagctacacaccccttataatagctaagctcacccccatgacaaanaacatgaaaatacaaaaaaaaagtccttactacaaagactactcanaatgccccgaaatacaaggctaaaaccctatactactagaatggccaaaatacaaggcccanacgaagganaaacctattctaatatttacaaagataagcgggctcatacttagcccatgggctcgaaatctaccctaaagctcatgagaacnctagggcctacncttggatctcta

SEQ ID NO: 302681 - DNA, 335 bp, Glycine max
  unsure (1)..(335): unsure at all n locations
agcttcaagaaaattatggcctcagaanacttcttatttccagaagggaattctatcaatacacctccaatctttaatggagagggttaccactactggaaaanccgaatgcaaatttttattgaggcaatagatctaaatatctgggaagccataaaaatagggccttatatacccaccacagtagaaagagttgccatagatggtagttcatcaagtgaaagcataaccatagaacaacctagagatagatggtctgaagaggatagaatacgagtaccatacaacttacaagcccaaaacataataacatctgccctgcgaatggatgaata

SEQ ID NO: 302682 - DNA, 436 bp, Glycine max
  unsure (1)..(436): unsure at all n locations
tgtagcaaattcaaaccccattaaattttaactcagatgtacgattaagtcccgcaatataacgagacgcttgatattgaaaacaaaagctctgagcaaattctaacgacaaanatgttttcctcggatgtctgattcagtcccgtaataaatcgagccgctcgtaattgaaaactgaagctccgagaaaattaaaatgacaataactttttactcggatgtccgatagtgtcccgtagtatatcgtgaaactcgacattgaaaacagaagctntgagcaaattcaaacgacaataactntttactccgatgtccgattgtgtcccgtagtacatcgagactctcgtaattganaacagaagctcgtagagaattcaaacgacaataactntttactcagatgtccgattatgtcccgtagtatatccatacgctc

SEQ ID NO: 302683 - DNA, 273 bp, Glycine max
  unsure (1)..(273): unsure at all n locations
gcgtatgctcaaatcgtcaccagtaaaccggacactgacgacctccacatcgcctgctaaagctgcatgcgcactgctccactgggccccacacccataatctccctcaacactatggggccgtgcctccacacttgcacatggcccatatccaaccctntgtctctcgctcgcgatgtatatagatatacatccacccccctcccaacacatcccattcctcatcctaacagtcttctcgagaaccatccaacgagggacacagaatattat

SEQ ID NO: 302684 - DNA, 162 bp, Glycine max
aagggacaaccaaggaccttcatcggagtttcacgacactgcaagatatatagctatgccgaacatacgtctaaaagttacatttcaatctgctaacaacaatcccatttcaagaacctcattttacgtggaacttacaaataatgacattgctacgaaatg

SEQ ID NO: 302685 - DNA, 509 bp, Glycine max
  unsure (1)..(509): unsure at all n locations
cggccacgcaggccattcgaggcgattgancncatgagnccnttcgananccccagacacnatataagactcaagcttgggcgtaacacacacccttattatgtcggcattcaacctttttcatnccacgggangcaaccaggatgagatgccaactgctcggcctaataacacataccctcaccttggaaagcaccatgcttgggtacacgctctagaactgagactcacgaggctcgtatctgttgcaactctcctgtcacatacattcgtgagattcataccagcatagatatatcctaccgaacatataatctaaccataatcatagacattcgaatctacaccatagaattcacacaataacacgtggttaatgagaggatagacaagatatgccattaccacatacagtgctcctgatagatcagtaacatctctctctacctcactcctgctcactctccgttgaagcatgccctcattcatacaatacactcatatctccg

SEQ ID NO: 302686 - DNA, 464 bp, Glycine max
cgcgggtccgtgggcttgatcatgatacttgggaacactcgaccgggatcttagagctttgcttatgaacttgactatacatcagtaatacgcgaagtttgacttgcaactttaccacaaaacatagtgaatccgatatatctttcctatatttagcggtcgtggaaacatacagtgatgaaggagaactcggtaatccttctattataaataatctttgcccccatgaaacagacttttgacaattgatcttcataccctgacgctcagacagaaattgcttacatactatccttcaccaatcttacttgaacacacagtacctctcacagaatacgagatcatcatcaaatccagataagatgacagataattggaccatgtgtggaaatatgaattggttcgcaagcatcatcccttctaatatattcctaatccatcaagccgctctcatgcaataagag

SEQ ID NO: 302687 - DNA, 436 bp, Glycine max
  unsure (1)..(436): unsure at all n locations
cagatgatagtgatgacgtacaagctctattcgcatatctagaaagagcccgactagtctaagagaagncaagtccataacttaccaactgaatagagtatgatgaactattggactgtaatatggccaccgctgaagccttggaacgagaaaccattgacgcccgaaaggaagaacacgtgcaagcacacgtatgaggggctatatatggcaacagtagtaagctcatgctgctaagaggagataggaatcatcacgggtcacaggcatgatcttgacggacgagctaatggcttaccttaggtcgaaatgaattctgtcccgacagctaagcgagactgaatggaatatgtggtccgtcatcgatgagtgctcagagaatctaaatctatcggcgactcacgagcaaaggctacaggatgagtacgccgagaag

SEQ ID NO: 302688 - DNA, 419 bp, Glycine max
agcttagaaaagaatggaatatagtcaaataatttctctattaatggtttctattcaagggacaacaaaggaaattcattcgagtttcaagacactgcaacatatatagtcatgccgaacatagtctcaaaagttacatttcaatctgctaaaaaaaatcacatttcaagaagttcattttacgtggaatttaaaaataatgatattgttaggaaatgttttaaggatactagtttaaaaaagttagcaaataatttattttaaaaaaattaaaaattacacttagaagtacatgaatctatgaaaaatgttaaattttactctctgtctctctctttataaaatatttttattttacgacacttagtattatatattctcataagattaaaagtgcaccacgtcatttatcaatgaat

SEQ ID NO: 302689 - DNA, 454 bp, Glycine max
  unsure (1)..(454): unsure at all n locations
ttgatatggaaattaagttgaaagtaaaggatggtatgtataggacatcaatcaatgtaatgaatgcagaaagctgtactgtgcctgagtgggtagcatgaacaaggtggccatttggtaatctaaccgtgatggggttaatttgatgatatgagtgaaagtttgttaaggaggaggaaacgtgatcagtggctcctgaatctaatatccaggaggtagagtttgctttttcgtaagatagggttatacctgttgcatcgttactagagcaagatgaaatggaagcgacctgaggcttggtggatgctgagtttcctgcatatggctgttgtattaaagccagcaatgccttgtactgctcangtgaanaacgaaccaattcttgagattcttggcgctgtatttggtcatctgtggcctttccttctacttgccactacgttgtagctattac

SEQ ID NO: 302690 - DNA, 396 bp, Glycine max
agctttccgtgagtggtgttttattctataccgcaactccggtgagagcatgccatcaaaaggcaccattgccatcgccatgcttaacgtctcttcccttcccatcagaagacacaatccaactaaaccaacctatgcgttttctcacactcgattaagaccattggaactccaccctcacaatataaaatatttatttcaaaccccaacaatccattcagcttcacaataattttcccattggtttatcatcattatcaaattcaaaacactcccccatcaactttccacacatgcttgattttagtacaaaaatgaaaaataaaaaataaaaacatcagttacaggcggttttaaacccccataaatgtaaaagtgacatgtgtctttacctta

SEQ ID NO: 302691 - DNA, 467 bp, Glycine max
  unsure (1)..(467): unsure at all n locations
actcagcttgttcttttataaaatgagaagttctggactcattattttatctattaatcttgnggtggatccaagtactccgatcatccatttgcatactcacgttntggtggcatactcaccgttgtttatttctttaggaatttcatcataactaagaaaacaccaaggcacccctataacactcgatccagaaaaatggataatgaagagggcgtgcaggaacagatgaaggtcgatctatcggccttaaaagatcaaatggcttccatctcggaggtcatgttaaaactccagaaaaccatagaggataaagccaccgcaaccgcctccagtacagttagggaagcggagccggtgctgcagcccgccttgaatccgggcctagacagaaacacggccatgttcggtcgaaggtatagtccgcaagcttatccttatggcctccctccggacttcaccccccg

SEQ ID NO: 302692 - DNA, 165 bp, Glycine max
agcttctgttttgaattacgagtgtatcgatatattacgggactcgatcggacattcgagtcaaaagctcttgctgatcgattatactcatagctcgagttttcaatttcgagcatctcgatatactacggcacacaatcggatatccgagtcaaaagttattgt

SEQ ID NO: 302693 - DNA, 315 bp, Glycine max
ctgagcacattcagacgacaataactgttgactcggatgtccgattgtttcccgtaacatatcgagatgctcgtaattgaaaacagaagctctaagcatattcagacgacaataacttttgactcgggtgtccgattgagtccggcgaatatcgctatgctctaaaatgaaaaatggagctctgaaacaaatcaaaagacgattactttttaactggatgtccgattgaatcccgtcaaatatccagacactcttaaatgaaaatatgagccttgaacaaattcgaaacactataacttgtgactcggatgtccg

SEQ ID NO: 302694 - DNA, 357 bp, Glycine max
agcttataatatatcgatacgctcgtaattaaacatcggaaactcttgagaaattcaaatggtcttaactcttcacacggatgttcgattctggcgcataatatgtcgagaggctcgaaattgaacaacggaagctcttgagaaattcaaatggtcataacttttcacacggatgttagattaaggcgcattacatatagagacactcgataatgaacaacggaagctcttacgaaattaaaatggtaataacttttcacactgaggtccgattcatgcttataatatattgatacgctcgaaactaacatcggaagctctccagacattcaaatggtcataaatcttcacacggat

SEQ ID NO: 302695 - DNA, 453 bp, Glycine max
tgaatcggacacccgtgtgaaaagttatgaaccatttgttatttcacgttatgctttgttgttcaatttcgagtgtcactatatgtgatgcgccaaaattggacattcgagttaaatgttatgaccatttgaattactcaagtgcttccgttgttcaattctgagcgtgtcgttatgtgattctcctgaatcggacatccgtgtgaaaatttatgaccatttgaatttctcaagagcttttgatgttcaatttcgagcctctcgacatattatgcgcccgaataagacatccgtgtgaaaagttatgaccattttaatttctcgagagctttcgatgtttaatttcgagcgtatcaatatattataaggctgaatcggacctcggtgtgaaaagctatgaccatcttaatttcatgagagcttccatgtttcattttcgagcgtctctatatg

SEQ ID NO: 302696 - DNA, 419 bp, Glycine max
  unsure (1)..(419): unsure at all n locations
gttttctaagacggtgtgtttttatccgtcgttgaaagttaacactctccaacgatgttagcctcctacgaacggcggcngaccgtctttgtatgtggtttacgaccctcgaagacaaccatttttttagcagtggctcatcagtcacctttgattccttttcttaaaacaggtaactcggctaagctatgcaaacaattagtagcctattcaagggactcaggctttctctgtaatgaatcacggtttgagaatctttatgagtggtgataataaaatactgataaacattgattaatactttgtgtatgcatgatagagcggtttacggaagttgacaccccacgctattcatcactacttctctgcaatctacatacttaaaaataaaaaccatctttaaatagttattctcagcc

SEQ ID NO: 302697 - DNA, 453 bp, Glycine max
  unsure (1)..(453): unsure at all n locations
actaagctaacaggcccttataggctgaaacaagcaccaaggtagtggtttgaccgactaanaattactttgattcagtttgggtttcaagctagcaagtgtgatccatccttgttcatatataagcgtcaagctcacactatttttcttctagtatatgtggatgatattatcttcaccgacagctcatcttctctcatccaacagattacaactcaacttcattttgcattctctcttanacagctaggtcaattggactatttcttgggtattgagatcaagtatctacttgataggtctcttctcatgactcanagcaagtacattagagacctccttcacaggactcacatggctgaagttcattctatttcttctcctatgacctcttcttgcaaactgtctanaactggtggtgaattatttcangatcctactctctacagatct

SEQ ID NO: 302698 - DNA, 480 bp, Glycine max
  unsure (1)..(480): unsure at all n locations
ncgcgcgtgtcctgacatcacgactaagggatncagctgggacccgctgaactctanaggcgagctgcggcctgttagcttgtaggattatggtgtacccacgacatgaggaactacgtggaccgccggcgacggcgcagaacatgattccagcttccatacactgcgacatatctcgccatgccgagcagtaccctccaagtgacgttacgtctgctaacgaagaccatattatcggacgtctactcaccgggtacctataaatacttgcaaccgtaccgaaatgcactgacgctactcattcacacaacgtatactatcatagcccatagcacagggcacaggcacaccattatggtcatggcaccatcgaaaatgacagcttctacacttagagaccccagttacaattacttctatcttaccaccccacgatgatcgactcgatacgatactggagccttagtaatatcatgaccg

SEQ ID NO: 302699 - DNA, 446 bp, Glycine max
  unsure (1)..(446): unsure at all n locations
ctaagcttctgggcctttctgcaagcttacattggttagttagntntaccaagaaatgctactcttaaaacaaaaatggcatacaacctcctccaataaacacaaacatcaatgtaaatttagagcaaacttatgcatatacttctttacgaacgttcacttgcacaagacattcttataactaagaaaaatgcacccatgtacaatcaaggcaccttcgttacctagattatttatatgtacttccaaggtgtatttgctacctacatcacatgcacttccttggctaaatttacatacatgcatactcaaagcatttggggtaccaaaaattgcacatgtgcacattccggtatttctaatacttatgcatatacaaactttgtgatgaatcttggctatctacacaataaggtgctacatttcataaattattcaagtgtttt

SEQ ID NO: 302700 - DNA, 392 bp, Glycine max
agctttaacctttggttttacacttcatatccttgcaagcaaaagcttgaaagataaatattgctaatttctgctagagtttgtctaaatttcctccaattagatgatcattccagatccaactcagtatgagtatagttaaatgcccaaattgcagtcccattctgtgtcacttttataatgaacgcattctgtgtcacttttataatgaacgcattctgcctaatgtcaatacagtacaagagaatttatttgtttcataaacaaagaactggacgacaggtagaaaattatgattcaattcagaaatccattgcaagacaatagccttgagattgaagagcttcagcatctgctacatgtctatatgactaacgacccaaaacagttac

SEQ ID NO: 302701 - DNA, 430 bp, Glycine max
  unsure (1)..(430): unsure at all n locations
tcttgaacgtgatcaatatatttattgtcacagaatatatgatgaagatgtggttcgtgatatcttttggtgtcaccctgattcagtgaagttagtcaacgcatgtaatttggtgtttttgatagacagcacctacaaaacaaaccggtatagactcccattgctcgattntgttggggtgacaccgactgggatgacattctctgccggttttgcatatgtggagggtgaacgcgttaataattntgtatgggctttacaacgcttctgaggcctttttttaaagcgtgatgccctccctggagttattgtcactgatagagaccaagcattgatgaatgtagtgaaagatgtattccttgaatgcacaaatttgttgtgcatctttcacataaacaagaatgtgaaggccaaatgtanatcactaatt

SEQ ID NO: 302702 - DNA, 257 bp, Glycine max
tagctgttcttcatggttggcatttgcgccaacctaacgtaaaaaatgctcttctccaccgtgagcttaatgaggaggtatacaagcaacttccctcacggctctcggttgataatccttaccaggtatgcacgctgcaacgttccttatacggtctcacacaagctacccgacaatggttcactcgtctctacttatttattgtttctcatggctatcacaaagcctccgctgatcattccctcttcttaagcttc

SEQ ID NO: 302703 - DNA, 445 bp, Glycine max
  unsure (1)..(445): unsure at all n locations
taggttatggatcactgtatggtttccttgaacctctgtctatacacaacgtanagaacaaacgtgaagaatgtcaacattacattcaaacatgggtcacagaatcacaacgagaagtgtacttgggagcttacctgaatcaataagttgaattgatgttgtacaatatggatattatgtgcattattgttgcctaactaatgtttttcgtcttcagggcacattggcaacttgttgttctgtgtccacgggacaatattgttgtttggttttgttctttgcataagaagcttgatgttaacatcaagactgcagtgaacaagttagttntaacattataagtcaattattgtatagaaattgtagcgtataaacacaatgattatntgattatatatgttaagttatttntaaactagtgcaatgaagacattaaccactactt

SEQ ID NO: 302704 - DNA, 168 bp, Glycine max
cacgtgtgcgcgatatgtgaagacgatgctccacgtacttatgatttggtccgaccatgcccttctgatcacgagctgggacattggcgcagggacgaatgccccggcatttacgccatcacgcataatgtaaacctttacggtcttaacagctctatagttgggcct

SEQ ID NO: 302705 - DNA, 444 bp, Glycine max
  unsure (1)..(444): unsure at all n locations
tgctcttaagatacttcttccattntaaacccttctgtacaaattgatggactaaattactacaaagtagccaaattaccaaaacattatactagcattaaataacacaattagagtcaaaacaaccctctaagtctaataaaagataaggaaagtgtcttaattggtaccttanaagtatgtgtatttggcacttaacagtttaccacatgtctaagaaattgaacttgttgaggcaaaatttgcattntgagatcttagcattgagtttcctctccttcaagatttgtagtagaatcttcaagtgtttggcatgttcctcttgacttctaaatcatgctagaatgtcgacgatgaanactgtaacaaccctaacaaaaattacaacttaagctattagaagaaactctgtgttgtgtcatttgtgcttgtatgtacttaatt

SEQ ID NO: 302706 - DNA, 282 bp, Glycine max
agctttatttagccagaatccctgattactttcggcttgcagaagatggattgacactccaggttagaagaggtatcaccttcatatgacttatcacactctacaaactgaaacggttgctgcttgtcacacaataacagataccgaaaatgcactgacgttacttcactaaaaaatggcacacgtgggagactgaactgtgggatgctacctctactatacacgacccagtatcatgtgatgtgagcgaagagtatgcacctacactatctaactcacacc

SEQ ID NO: 302707 - DNA, 424 bp, Glycine max
  unsure (1)..(424): unsure at all n locations
tccagaggctacccttccccctttggtgccactgttttatacgttggggtcaatttcgccatttcctctctcaacgcactttccgccactctctgtttctttactctctctgatttccagaatgtgagtcagttactcctctcttcatttcccaaatccggatattcacgttaaaatagcagctaaactaattctaggtaaataagtgttctcgtgtctggtttctaattccggaattgattctaggtccaaaattgaaataaactttaagcatgtttttgcgttgaatgaaaatttttaaaccgaacaaacatgtgactntacttcaaaatcaattntacttcaattcaattntgcaaacgatcactcaattacacactanaacttctgannacgtaactcagtggtagtttgtgggtgttga

SEQ ID NO: 302708 - DNA, 479 bp, Glycine max
  unsure (1)..(479): unsure at all n locations
gcgcgcnctgngtgtggcntctgaaccctggaactccantcggacccgcgaactctaaacngacctgacgcattttcctttaaccttttttctacactgtatatngttgcaagcagaagcttgacacatatatatcgctcacctgtgttacagcccgtctacactcctttcaattgcatgatcattccagatccaactcactatgagtatagctaccgcccagattggagtcccatctctgcgccacttttataatgaacccatctgtgtcacttttatcatgaacgcattctgcctaatgcccatacagtacaccagaacttattcgttccataaacacagaactggacgacaggtccaaaatcatgatcacatctcaattcattgcagcacctagccttgacatcgatcagtctcacatctgctacatgctcatatgactcacgcacaccaaccagtactgggtttctagcacaccg

SEQ ID NO: 302709 - DNA, 436 bp, Glycine max
  unsure (1)..(436): unsure at all n locations
tttgttntcaatttcgaccatctcgatatattaccgttctcatccggacttccgtgtataaacttattgtcaattcaattttctccgagctttggatcaaaattttgagcgtattgatatattacgggactcattcagacatccgagtaaaaaattattgtcgttagaatttgatacgagcttccgttttcaatttggagcatctctcgctaaattgcgacagtctgtcgggcatccaagaaaaaatttattgtcgtttcatatttctaagagtttccgttttcaatttggagtgtctcgatatattacgggactcaaccggacatccgtgtataaagttattgtcatttcaatttgctcagagcttctagtctcaatattgagcgtctcaatatattacccgattcaatcggacatgcgagtaaaaagttattgt

SEQ ID NO: 302710 - DNA, 390 bp, Glycine max
agcttctgtttttaatcggcctataaaagatatatattgatgacagtacaagaagtacccctgccctgttacaaaaggttccctacagaatattccacacagtttaatgagccaaaatacatgacggaaacatataaaaacagaaatagtaatgttgtatggtgtttcccagcacaactgaagttaagatacacaatattatatgctccctaaatccggacaatgcacgaaactaccccaacatgttcctcgtgaattcattcccttttgcttcatctcccaaaaattccaaccaaccaacaaatgacaactttctgaaatttatcttgtaaagccaaccaccccaatatttcgcccacgtagcaatatatcatctcagttgagtcattc

SEQ ID NO: 302711 - DNA, 431 bp, Glycine max
  unsure (1)..(431): unsure at all n locations
tggacgtacaccgatatttggtgttttttgaggttgttatatggaatctaacttagaagacgccaaaatcccactcaaaaccatgcaattcgacggaactgaagttggtgagtattctagaacttgttcagcagaatgatgcaagatacaaacaccgatattgaatatatcatttttggccatattacattatgcacttgaaaacaaaatgaaaagtaaaagactggttaaaataaatgtgaacttttttctacgtattatgatggtaatttctcacctatatccacattggagttatccgtgcgtntcaaagttaaccgaacacataagatatgttgaagaccaataattactaactttattatgataatactaccattgagaataaaagaaattatctttttaaaagacaaggcagacgaatacttttg

SEQ ID NO: 302712 - DNA, 411 bp, Glycine max
agctttatgattatgaaccacgcaattttgatgatgccaaaagcccaagtaattgattcaagacttcaagatcaagcatcaagaatccaatccaagattcaagagaagaaatcaagaagcaaaaagtcacgacttcatatagtataagtattaaaagattttttttttcacaaaccaaatagcacagtcttgttttacacaagaattttctcaaattttctaagttaccagagtggttactctctggtaatcgattaccagttggcagtaatcgattaccagtgaccagtttggttttcaaatgttttcaaatggcttacaatgttccaaactaattctcacatagtgtaatcgattacactatattagtaatcaattacaagtgaatttgaacgttggaattcaaatcca

SEQ ID NO: 302713 - DNA, 337 bp, Glycine max
  unsure (1)..(337): unsure at all n locations
ctcagctttcgtcttacgaatgcaacaagttatacggattctcctcggtttttccgcccgtcagcgtgactcaaaagtcagtatgacagatcttgtgagcgcggaagataacgtaaatctccacgtgtcaacgggcttgtcagccgtgattgacgaagggcgcagaagacgacgttagtctctgcgtgctatcaggcttttcgtcatacagacaacaaaaagtttatacggataaccactcgggtatttccgcccgtcagcgtgactcanaagtcagtatgacagatcttgtgagcgcggaagatgacgtaaatctccgcatgtcaacgggcttgtc

SEQ ID NO: 302714 - DNA, 205 bp, Glycine max
  unsure (1)..(205): unsure at all n locations
gtcactggttcacttccgcataggagtacatcgctgatcttatacaataacacctaacacatgtgcgacctttgcattgcatatcatgccatacagngatcaacaaacgaatcgagtgataaggacatacattacgcttgtaacgaggctacgcttcagataatccatggattctctaggatgtctacgctgatattctacgaca

SEQ ID NO: 302715 - DNA, 441 bp, Glycine max
  unsure (1)..(441): unsure at all n locations
nttcgcanagcttacggtaaaatctgggacctagccttgttagaagtcttcacatatgccatttcctccctcgcccagtattatgatcagccgttgaggtgcttcacctttggggacttcgagctatcacccatggtcgaagaatttgaagagatcctaggatgtcctctagggggaaggagaccatacctcttctcagggttctatccctcattagctagaatttccaagatagtccaaatctcggcgcaggaattagaccacaggaagcaagtcaaatatggcgtggttggaataccgagataatatttggaggcaaaagcaagaatcttgacaagtaaaggtgaatgggcctcgttcatagacgttctcgcactgttgatcttcggaggaggtctctttccaaatgtggatgggttggtggacctagcagcaatcgac

SEQ ID NO: 302716 - DNA, 408 bp, Glycine max
cttcctaagctgcaacttttcaagcatgagtattagtcgctcgtatacatactgaaatatctggaataactcttccgtgaaagggtcaccacctgccttgaaattcttaaatcctcgcaatgccctcgcatagcgattgtctcctgatcctgattcttcctcaaactgatgaacacatacatgaacaaacaattggctgtcgcgagcgcgctttacgcacttctccaatacactgcacacctccaaagttttcaaactattctcaaagtattcctcaaccagttcaaacagtctcctggctcttccaaatgtcttttttgcagcccaagattaccttgacaacttcctggtcatctccagaaagcatttgagattcgtttacagatcgaagaaagggtcgacttcaac

SEQ ID NO: 302717 - DNA, 500 bp, Glycine max
  unsure (1)..(500): unsure at all n locations
ncgcgcgggtccggtgaggcttatgacntcctcgaanantcaagggaatctagatagtacgccgggatgctttcgagccttcttgcgttatgcaagctttaacaatggacgagatatggatggctgagtcccttggagatatcaccaaaaacaactttgcagctgaaaataaaagatgtgagatcaacggggcaacaagtcgatgctctataccctgtggactccctactaccctaaacctcttgccctgggtggcacggcgtcaacatagaacaacagagacacctgatctccaatccttacattaactccacgaacgatgttggtgtgggacaagctatcccacattcctcaaataaaccacatgctccccatttcatgcaccgggacacctctatgctgcaacactgcatatgaactctataccgtcaatctgccatatcatattcgcacacatgctctatggctcacgaccgagccttctggccatccgctcgccg

SEQ ID NO: 302718 - DNA, 361 bp, Glycine max
  unsure (1)..(361): unsure at all n locations
ctacatcacatgctgcanttcggaatcagctcctccaattaagaacgttatgcactccccgcaccgcgcatcttggcgatcgtggcgcaactgaccgcattgtgctccttcaacgttaccaagatgttattcggtttcaccatcgactctgtcatatcaccaataatgctcttatcttccttagccagtcgcccggcgtatggatgtccaactaacgacttcnccatttcatgattgtgaatgcacagatcaactggagcatccaagctttcccttcatgcactgggttcccacgaagtctgaacgcacaaccacattctctactacggtgtcttttctaacgaattctttatttccacac

SEQ ID NO: 302719 - DNA, 498 bp, Glycine max
  unsure (1)..(498): unsure at all n locations
gcgctgccgatganactgagancnatcgaagagcatancgagaatcccagctcgggatccgcggatactttagagtcgacctgaggccttcagtctatcacaacgggaatggtaaagtactagctgaggctgatattaacacggtggccatgtgttcttctgcaagaagaaaggacacgtgaaacagaactgcctcggcttcccacagctggcctcaccacgacaggtaaactcactctcatcactctgctatgaacctaccacgggtagtgttaatatcaacacctacctgattgatcctgcatctcccatccatattgcacccctcttacagggcatcgaaaccataccgaacccatcgcgaactgacaacaccattctatcacgcaataacctattgctacattgtggaggccattagaactcgctcctgactttcctcagcgctctatattcccctagatacgactctttatgttcaactctctccccactccc

SEQ ID NO: 302720 - DNA, 438 bp, Glycine max
cggcctggtctgacctatataaacaattggctacgcttttgctcccccaaaaggcgattaaattaggtacgttaagcttccgcatattaaaaagtcttataagcctgataggccgacctatatatatatatatatatatatatatatatactatatatatacatatatatacatatatactatcttgtgggcgccataaatattcatcttgaaaaacactcgcacaccacatccctataatcaaccaaaggtctacttacactgcgtgcacccttcctcatctatcgacctacccctttgctgtaagacatccttctacatacaactatgcgcgctctatttctataacgtacattgtcccgcagagaaataactcctcctctcccgtcgtatcttgcccgtcccatgacaaacacggctttctatgcatctcacccc

SEQ ID NO: 302721 - DNA, 282 bp, Glycine max
tcacgcttatactaatttatcctaccatgctcagactgaccggcggactgaacggaccattcacccgctggacgaccttttgagggcatgtgtcttaaagcacaagggcagtcggcacagtcttttgacgttgatagagtccacttataacagtagctctccctctaccattagcatggctccctatgaagctctgcatggtacaacgtgttgcacacccctatgtctgctatagcccggagaagacactcacccacgccctgcactggtgcatcaccacac

SEQ ID NO: 302722 - DNA, 364 bp, Glycine max
agtgcacaatatcatctctaatatttctatgaagagtttttattttaaaatccttgcttagcaacattcacttttttgcccgaactagcacagaatatgcctagtatttacttaatagcatcaatctgctctaagtttgttcctgcacaacatagaaaatcatttgcaaaggcaaggtaagaattttttggaccacctttagatgattcaataggcttccaaattttctgctccactacatcattaatcaattgaaataatctctcaatgcaaagaacaaatagatatacagagataggatcctctatcacactcctctaacatgaatgaatttttcaagagcttctccattccacatcacctg

SEQ ID NO: 302723 - DNA, 429 bp, Glycine max
  unsure (1)..(429): unsure at all n locations
actcaagcttgcaatctcctctggacactccacataaccagtagtaaaataatgccaaatatgagctnttttttagcttaagaaaatctagcctgacaatagtagaataataccatacaaaaacacaaactaacaaaatataattaaaccctttctccattgtctgatctaagcatttcaccttgtgcaacanaggtgctacaaggtactaaaatcagacaacagaaaagcataccttgatccttgtcacatttgcttaaacatatcaaaatgttgatgccattctttntctgacatcaagatttcagcccttggagttgttctcccacttgcttttaatttctcattaacaagtaacgtggagaattcacaccanacagctttcactttaatgcagaaggaanaccaatcaactctcaagcatcacat

SEQ ID NO: 302724 - DNA, 444 bp, Glycine max
  unsure (1)..(444): unsure at all n locations
gccgcccggtgagcttganactgagacttganaacccaaaactaagcggcctatgaggactacacagatttaccccgtttacttttttcgagagacgaccacgaccgtcacgtcatgacgagtgacataccacaacgccaactctctttacgctgtagctatatgccacgtacccatccattatctagtgaatactaggtatggcctaccactgttctactatacaatgtgaaattctagccgtctactaattcaatatggaaacacatacaacattcttaccttgcaatcaccgatgatgaatcacattcggggacacttatatctcatctaagtgtgcactcataactcatatcaacgaaagcgcagaaactacatattgtgccctttccatgaccctacgacgtgcgataccagattatattacgcggactatactgaccg

SEQ ID NO: 302725 - DNA, 154 bp, Glycine max
tttcatgcaagctttttggagtaaaaacatgggaccaactcattttatttcaaaaccgaagtcgtatctagtccatgtctgagagaccatacaacgttcctaacgatctctaattatgtgggccattaagtctatcatacgctgacaatagccg

SEQ ID NO: 302726 - DNA, 449 bp, Glycine max
  unsure (1)..(449): unsure at all n locations
tctcaaggaggtgagcttagttatgatatgggtgtgtgtagctaagctctagcttctcaaggaagttttctcaaagaagtttctcaaggaagttttctcaagaaagcttctcaaggaagctacctagtctataaatagaagcatgtgtaacacttgttgtaactttgatgaatgagagtcttgtgagacaaaactcaaagttcaacttctctccctttttcttccttcaatttcgtgctcccccctatctctttctctcccactttcttttcctccattgaagcatcctctccaaggctcatcttggtggtgaagctcattcttccatggcttattccttagtagatggcgcctcctctcacctcttctcctttgtcttccactgcatctccatggtggaaaatcaccattaaaggacctcattanagctcanagatcccagcctcata

SEQ ID NO: 302727 - DNA, 449 bp, Glycine max
  unsure (1)..(449): unsure at all n locations
ctataaaactcagcttntatagctttgttaacctatcatttaattataatttttattaatgcaatcaatctaaagcaaaagaaaaaaaatgcaatcaatcgtttccaaaattcttaatagaaattttaatcaattgtcaagctatttaagcaactatctattattaaacacatatattaaatattataacatatatanttttgcatatctaaacgttgggttatcttgtttaattttcaaacctgatatcagtgtaaaaaatttctaattattaatgcaaagtctattctttttctcatatctataattctagttcttaatattctgtttatctaaatctttaatttcaaaatattttatctaaaggttcctttaatggtgaaattgaacgaatagaaaataaaaactttaactgtaaataatctattcacaaatgattttcttatata

SEQ ID NO: 302728 - DNA, 425 bp, Glycine max
  unsure (1)..(425): unsure at all n locations
taacaaacttagaaatcaagtgatcatgtattccgattatagggggaganaacggatgcacattntatctatatacaattgtttgttgcttgaatcttgatttcaggtattgtattgtcatcatcaaaaagggggagattgtagatgcaattggctttgatgttttgatgatgatcatgatgatgtgttgcaattgatgcaaatgggcttttcaagattaaaattcaagacaatacttcaagattacaagtcacaacatcaagatgatcactagaatattaggaagggaattcctaattgaattagcaaaggtttggccaagtgatttaaaataaaaagtgtttttcaaagcttttactctctggtaatcgattaccagaggatgtaatcgattaccagtggccaaatacgttttataacagcta

SEQ ID NO: 302729 - DNA, 408 bp, Glycine max
  unsure (1)..(408): unsure at all n locations
agcttcaataagcaggaaaattggactaaatctntcaagtacactctttgcaatttgaaatgggccctctattggtttgttggaaatactaacttccagcccctttcagcaatggtatcttcgcatgctgaagtgcctgctgtacggtctctgtacacgaagcgtggtgtcgatgccaaatctgaatctcgaaattgaacctactaatcatatgctaggttaggctacatagttaggccacatacaaatgtgtacatagaactacatagtcaaaattgttactcgatcaaattgaaaaggatgttataagggtctctctcaatttgaagacaaaaagggtgctgatttgtaccactaattggattgaaatttacagcattctcttaataagaaatcacaatttgatgt

SEQ ID NO: 302730 - DNA, 443 bp, Glycine max
  unsure (1)..(443): unsure at all n locations
tgatcaaaacanaatctatacattccaatccacttaattcatacaatttctcattcaaatcaatcacaacacttcattctatacaaaatcaaaccactgaatcatattcaaatagttcactattcaatcatgcttttgtacaagctactactacaaacaaaataactgaaatttaaaagactaaaatttaaagactgaaatttanataactaaaacataaacataaaataaactaaaatagaataataataaactgttcaaaatgcaagacaagaagataaagatcctgtcaatccacctgtggatgatcctctgcatgctcgttcaaatccaacaccggagcagctggtggatcctatgaaatgggctgcttttgctccaatgctggtgcagatggctggtaatcatcagtaattggtgctggagagacaggaactacagct

SEQ ID NO: 302731 - DNA, 340 bp, Glycine max
  unsure (1)..(340): unsure at all n locations
agcttgccccttgatgacggtttcttgtggacgaaggcatgcacgtattgtttcatcatgcgatcncaaacttccgttcgtccatctgtttgtggatgataagctgagctcatccgcaatttcatgtcgctcatctgaaacaggtcttgccagacaattgcttatgaataatgggtctctgtcggagatcaagctgcgtggcatgccatgacactctctgacgatgtccatgaacaggatgacgactgactaacctgagtgctgagctggcagcatgcctacgtgtatgcctcttgaacctcgatctactacacacaatatggcagtatttctgtgaatc

SEQ ID NO: 302732 - DNA, 454 bp, Glycine max
  unsure (1)..(454): unsure at all n locations
ttccataccttgagggaactcaactcatctaagattctatataaaggttctntatgactagtacccttgccattaacactagatgaatgatgactcatgttgcttcctaagttgtggttctttcttgttggaggtttgaaaacaaaaggtaaaagaaactatggttgaaactagccaaataaacactaaaagaggtgtgaaagataaggtaaaaaactaattggtaaaaggaaagctatctangcggtttgacaatggaaggtaaaggaaataagctatgaaagtaagcaagacatgtaaactaggcgaatcctaagagtgtttggatgaccacattcaaggttcccaacanaacactcactatcctaaggaaaaattgcctaaaattattacacacaaatggaagtttggtaacctattggaggctcccaacacactttcaatgaaaggcctt

SEQ ID NO: 302733 - DNA, 452 bp, Glycine max
  unsure (1)..(452): unsure at all n locations
nttgatttcaatctgaagcatctcgatatattacagtgtttcagtcggacatccttttanaaatttattgctgtttgaactttctaggagtttctgttttcaatttctagtgtctcgatatattatgggactcaatcggagatcctagttaaaagttattgtgatttgcttatgaaacgagctttcgttttcaatttcgagcgtctcgatatatgacgggactcaatcggacatccgagtaaaaaagttattgtcgtttgaattntatacgagcttccgttgtcaatttggagcatctcgatatattaccggactcaatcagacatccgagataaaagttacagcggtttgaatttgctacgagccatccgtttcaatttcgagcgtctcgatatattatttgactcactcagaaatttgagtaaaatgttattgtcgttcgaatctgatac

SEQ ID NO: 302734 - DNA, 268 bp, Glycine max
cgcttgtagctgtattcgtctattcattgtgtcgcacaccgaatatctgtggtctctgtttacctgcgcacatctcaattccttattgtgaatcttttccatttgctagctatcataatggtaactcgtacgcgaatattcaaacaacgatacctgcataccccctttactctattttactatcaattatatcacatgttatagttacagaattaacatgaattgcgtctaagaaaaataactaatttctcacccaacaccatatcta

SEQ ID NO: 302735 - DNA, 449 bp, Glycine max
  unsure (1)..(449): unsure at all n locations
ttggatatcagaggctaaagttcctgagttgtgctttttattatacttgacttacgggacaaccatggccggtctcaaggtagtataaataattaattgaactttcattatattttaaaaggcccaattttgtttgtttatttagatgtgacggtgaacgaatcaatctcaatcattgtctctttccctctcaccaggctattggctatgactntgactatgatgactttcatgggtaattgtctttacatatttgagatttgttctattttttttccatttattttaatcgttagaaatcatgttaaatataatggaatccaaaaagtatttagtgtgtgttgagcagctctgttcatgggagattgccatatgatatgctgaaacctgaccctgttctcangggaaatttgctaagcttgcctgttcgaanagttgtgagttccttt

SEQ ID NO: 302736 - DNA, 285 bp, Glycine max
agctttaatcaaagttctaattaagatggcgagcttacaatgaggaatattattgccactacaccttttattctaacttcaccatcatcattctacaaaatcagattaacttcatcatggcaacttgaattatcatgtcatatataatgctattagtctataggcctttctgggtacacactccataattctttactatcacaggctttcaattacctatatgtacccataccaacaccctcacaaaattgaagacgtatactcttacactatgatgactctttt

SEQ ID NO: 302737 - DNA, 451 bp, Glycine max
  unsure (1)..(451): unsure at all n locations
agcatgtgcgcattgagtgcacatacataatataacattttaagtgatcatcgcgctaagcctccaaatgcgcgcttagtacacatgcacagtacaactgacttctagtttggcctctcatgctgagtacactcctccaattcttcatgcatttttttgatgatgtactaatactctataaaataaaaccaaacagtataaatttactcactttagcattctgaaactaaaaacctaaatttttatctttttagataaaaaaaaacattaaaagaattagataattactatataatttaaatgcacaaactaaatatggataacaattatcaaattaatagtaaaaaaggttcaataaatgacataatagggatggcgaaggggtacacaaagtcacacggaaagatgttctgagatgattatatttttcaacaagactntgcttttgaat

SEQ ID NO: 302738 - DNA, 303 bp, Glycine max
ttaagctttaagcaagttgcttcacaaataatcatcacacagtatgcaactagcaaagccacccatcattatgtccgaagcacctatacgcatgaaatttatgagagaaagaagtccacccaaacctgaattgtcgaagtcccagtcgtatgcacgcacttcatgaccccgaagatgctctcctttcgcgatttggggcagaaatgatggccaacggctgaagctttgtgtggaggttccatggagactgaagaataagagaacgacaccgtgagggacagagagggctgtctgaaatgactg

SEQ ID NO: 302739 - DNA, 432 bp, Glycine max
  unsure (1)..(432): unsure at all n locations
tttaagttgtgctgcacaaggaggatgtatgaacatttcatctttaattgttgagttaagagtgtgcaggtagtttctaacatttgttacttatttttatttgtagaacaagttgaaaataccatgcatttcatataaagatggggcatgaactanaagaaacaactggcatcaaggatcaagctggacttcaacacagtgttgtgattgttgtggaggtcgacaatggaaaaggcaaactgagagcctactttggcgatgaaattatgtttattattaatgagtaccacacttatcaaagttgttatggtcaatttcaattcatgggtgaatgcaagtttatgacccattttaccccgataagtccattagcaatgcctcatactcaatgcctgactcattccanaatcactctttaaaggatagtcattc

SEQ ID NO: 302740 - DNA, 115 bp, Glycine max
agctttgagcaaattttaacgacaataactctttactcggatgtctgattgagtcccgtcatatatcgacatgctcgaactggaatacccaagctctgagataatctaaacgacc

SEQ ID NO: 302741 - DNA, 431 bp, Glycine max
tcggcattcaagtccaatcgtctcgatatattacgggactgaatcaggcatccgagtaaaaagttattgtggcttggaattgcagagagcttcggtattccatttcgagcgtctcaatatattacgggactcaatcagacatccgagtaatacgttattgtcgtttgaatttgctcatagcttcgataatcaatttcgagcgtctcgatatattacgggactcagtcaaacaaccgagtgaatagttattgtcgtttgaatttgctcagagcttcaacattcaatttctagcatctcgatatattacatgactcaatcagacatccaagtaaacagttgttgtcgtttggaattgctcagagtttcaacattcaatttcgagcgtctcgatatattacgggagtcaatcgaacatacgagtcaaaacttat

SEQ ID NO: 302742 - DNA, 359 bp, Glycine max
  unsure (1)..(359): unsure at all n locations
gatcctctnagccgagatgacggcctgcaggcttgtagctgcatgtgtgctttgtcatgtggcgcacaccgaatatcggtggctctactgattatctgtgcccacatcatttacctatggagaattattttcatctgatcactatcataacgggaacttctgtgtgcatattgaaacaatgagtcctggatactcgttttatcttatattactatcagttatatcacatgttatagtgacagcgctcgcatgacgtgcgtctaacaaaaatacctacttactcaccatacactatatctataggaaaccttacctgagaagacaatagcttcaagatgatcagctatatgaatgtaata

SEQ ID NO: 302743 - DNA, 429 bp, Glycine max
  unsure (1)..(429): unsure at all n locations
taacttaacataattcacatcattntttaatcattgtgtaacttcacttgncctaaggatttaatcacaaaatcatattctataccttcacattaatcacatgttcataacacaacatctcaagtacaacacaacatctctcacacacaattcattacccaccatcacatagcaagtcacaatgatcattacacagacgttatgcaacatatatactaagactcaatcctatattgaatgtggtatcttatcagtgaaaaataacgctagggcacctaggattacataataaaatacaccacacaatgggtaagcaggtcactcttattaaaagacatcataaggtgatcaattacggttattctgtttagcgtgaatgctctaaccatatgagatcaacatagatntaaaggagcactcacatcgagt

SEQ ID NO: 302744 - DNA, 411 bp, Glycine max
  unsure (1)..(411): unsure at all n locations
agctttactatcacaagcacatacacacattactccattaatgcatcacacgatactctatttgaaaatggatctttcactctgtacctgcaaggactgctgacccttccacctgatagttcattgaatcaattgacacaatatatcataagacataagtctcaaagttcataaatagagagagccacacggtcaaaataagcacactaaccatgactgcagaaacaaatattgaaatacataatataccactattatgtgtagcgcatctcttcaattcttgtacctaaaactcgattntcttgttaaccacacgcaaaaagaccaccaaaacgagacttgtcaaccacttgagagcctaactgaacttgcttagattataattctgctcttacgaacttacaatgctat

SEQ ID NO: 302745 - DNA, 453 bp, Glycine max
ttgatggtgtcaagaagaaatcacatgtttgtcatcatcaaaattgggaagaatgtgaatgtatgtatacatgattttgatgatgtcaaagaagaatctaacaaggctgcttcaaaggataagcatttgcttcaagaataattcaagattgcttcaacaaacaaagccttgtttcaagattcactaaagaccaagccttgccttataacaaagtgctttcaagacatgcaaggctctggtaatcgattaccaggaagtgtaatcgattaccagaggacagggttgagaaatagttgttgaaaaaggttttgaatttgaattttcaacatgtaatcgattaccatatgtctgtaatcgattaccaacaacggaactttggaaattcaaattcaaaagtcataacccttcaaattataattgtgtaatcgattacacaaacattgtaatcgatta

SEQ ID NO: 302746 - DNA, 385 bp, Glycine max
gggccaatcatagggtgctacactactatagccacacttggcgaatgaactctccgacaggatacagatgtggggccgaaaattctgccaaagtgacaatgatgttctccgtagtcacccacatctctcatagacctcacaggaatatatcataatatgatgctctatgctgactatgcatatcatgtcataaatgacattctgcaggttaggaccggagacctttacatcatgactttaacagtccagacatctatctaggatatgattcagagtgactatcaatatatcagtcgcatgacactagattaccttctggtgcaatgctggacctatggcacgacgtctacctcgccatatttcaccatctgctgagatgagcccg

SEQ ID NO: 302747 - DNA, 416 bp, Glycine max
  unsure (1)..(416): unsure at all n locations
tttgagttntcatttaatgtcttanaaaaagaaatattgngcaccatagaaaggtatttttttgttgttgtcaaaatatcagtttattaaaaaaaaaaactcttgactctacaatagaaaattcccatgaatagccatctctcaagaagattgatggtttcgacttttgcctcccttaattntttttagatttaaatatgtttttgtttcctcaaatttgggtcacttttatttttgaggaactaaaaatagaattttttgaaattgaagaactaaaaatattttaaaattttggaccaaaataaaataactaanatttgagagacaaaaaatatatttaagtttttttattctataatttaaatagttggtttaattcatataaagagaaaacaattcatttatatcctctctaa

SEQ ID NO: 302748 - DNA, 182 bp, Glycine max
agcttgccgatcgtctgtcttagttgaataggtgtattactgatatttggtggacggatcattaaccaagggagacgtctctaatgcagcagatttcgacgctggcaatatatgttcacttggcgtaagaattagcaagtgatgaatgatttacttgtggatgaacgtggccacagacccct

SEQ ID NO: 302749 - DNA, 438 bp, Glycine max
  unsure (1)..(438): unsure at all n locations
actcaacttggaatcgatacaccccttntaatcgattacatttgccatctcaacctcctgaccctatttttaggcctggtaatcgattacacacccttggtaatcgattaccagagaccaccttaacttcctgtcttcatttttaagccttgtaatcgattacacacccttggtaatcgattaccagaggccatattccaaatatcactcaagatccatagctggccagccaccacacaagcctccttgctttgtggtctttgttcttttatcggttgactgccaggagctctcctgtttaagtacgtcatangttctcactgaatgactatgcccaggttgggtcgggattggtcaagcttggttntgggcaatagcaccccacctggcatccncaaggtctcctggcccccacgacatatctccaggtaccactct

SEQ ID NO: 302750 - DNA, 409 bp, Glycine max
agcttgttaccgatgaggttgttgacttcttgcgtggaaagaaggttgacctcaatttgctggagaacttgaagagcactctgagagtggctggaggtgtgcttgatgatgctgagaagaaacaaaccaaactctccagtgtcaaccagtggctcattgagctcaaggatgttctttatgatgccgatgacatgctggatgaaatttccaccaaagctgcaactcacaagaaggtacgtaaagtgttttctcgctttaccaataggaaaatggccagtaagttggaaaaagtagttgggaaattagataaagttctagaaggcatgaagggtcttcctttgcaagtgatggcacgggagagcaacgagccatggaatgctctgccaacaacatctctggaagatggata

SEQ ID NO: 302751 - DNA, 453 bp, Glycine max
  unsure (1)..(453): unsure at all n locations
tatggattcttcgaggtgacctctaagttgtcgcatgttttcacgggcaatcgttacccctgaagcaccattatggattcgtttcttgttcttcgctatctagttcatttcttcgaggcaaatcgttaacattctaggttgtggaaatcgcaaacccgtaagctttttgcctcgtcgtcgtctagttggtttttagaagcaagaatgtcgttctgtttgggtgtcaaaggtggtggttaaaaaacatggctgtcgcctgaaacatgtcatcgtcagcgtcgttcccatggaaagaagttcctcatcgtacaccttagagccccgaagtcgcgtgatgtgtttgtgtaacgtagagactccattggtgacatcgtggatngaggataatccacganagctttntatggttgtggtcaatataaggtaaggaataatgtatatcgtgggttatgt

SEQ ID NO: 302752 - DNA, 409 bp, Glycine max
  unsure (1)..(409): unsure at all n locations
agcttgtgacttttgtaangtctaacgaaagggaaacaggaccaaccaaaggctctaagaacgttataatctggattcttgttgacaaagacagtagtatagggaacattacaatgcacagaagcagtacgcaatctatctatcaagtatgctgctgtagtgaaggcaaaatccccaaacttgagaggcagtgaagcttgtttaagaagagcgagtcctaattccacaatatgtttgtgtttcctttccactacaccattttggtgatgagtgtgtggacagatcaatctaagagtgataccttggcttgctaaaaaattagtgagaggtctgaactcttctcctcaatctgtgtgaacactcttaattctggagtcaaactgaagttcattagcttgaactgttgaaa

SEQ ID NO: 302753 - DNA, 455 bp, Glycine max
  unsure (1)..(455): unsure at all n locations
ntgatgatatgttcttcaccgacgaaagaatcaaaatgggtctaattttaggcaaatctgatcatcatgctttgataaatgcaaaaacaagaaaactagggcaaatgaagagggtgagaatgagggagaagcctatgctgtgacagccattcctatatagccaagtttcccaccaacccaacaatgtcattacttagccaataacaaaccttctccttacccaccgcccagttatccacaaaggcaatccctaaatcaaccacaaagtctgtctaccgcatttccaatgacgaacaccacctttagcacaaaccanaaacaccaaccaagaaatgaattntgcagcgagaaagcctgtagaattcaccccaattccagtgtcctatgctgacttgctctcatatctacttgataattcaatggtagccataaccctagccaaggttcatcaacct

SEQ ID NO: 302754 - DNA, 361 bp, Glycine max
tcacgcttgatgacatgttgagactgatgtgatcttgcgctatcacaagatctgttctattgacgtttgaatcacgctgactggcggagatacccgagtggttatccgtataaactttcttttgctatgtctaagacttaaagcatgacaacaagctgagggggtaatcgcgcagaacatattctgcacctttatcattcataatcgcacccgacgagtgggtaaacacgccgatacatattatgctccctttatcattcatgaacaacaagctgagtgggttaacgcctatccatagatgttgcgccctctatcattcagatttctcacgttgcgcgatatacacgcagaaacaaatcct

SEQ ID NO: 302755 - DNA, 452 bp, Glycine max
  unsure (1)..(452): unsure at all n locations
tgccactgcagcagttaagtgaacaaatgaagtgtctatagtcattgtatggttgcttggtagaggtacatgtaattaactaataagatttcctacgtgttaggtataattattaagaagaggcactatgtatatagactnttatatataaatcttattagagttttaacacaatctccactggtggttgaaatttattgagaattataaaataagaagaatgactcatcaaatgactagtgggacctgccaaatttgtgattnttaagaaatttgagccaacaataaagagtgtgttcaacagaatgtgttagagacagtgttgctagcatttctctgtttaggaatggtgtttgtagttattagtgaaaatagaaatagaaaatatcttccttatgtcaaacaggctcctgattntcagtttcctcagacttgtgctgtcatgtgcgata

SEQ ID NO: 302756 - DNA, 323 bp, Glycine max
  unsure (1)..(323): unsure at all n locations
agcttatacattttactcatttaacaagaattgccactgaaacgatagcattggctgcacttgcaatccttggccacagatcagcacactcttttccaatgggaccagtgatagcagaacctacattgaaacatgtcacaaacaaaattactaccagcaaatgcatcaatagaaggtcaaacggcaaagatgaagagaataacaagtacatgagaacatctcatctgtatttctttctttttgaaagccaaaaataatcagtggctactcactacataaacatgcactttgttaccatgcanataaaatcataaacgatacct

SEQ ID NO: 302757 - DNA, 457 bp, Glycine max
  unsure (1)..(457): unsure at all n locations
tataaacgaaaatcaagtgggaaagatatttttcatttatttatagtttagttctaaaggtctgatcaagttgtatgcaatggttgaccgatctctagaagaaatccttgccctaccgtgtaaaccaaggaaaccaagacctgtcaaagagataattgctntgatgcattgattaatgacgacaacaagctctaatgaagatcataactctatttagtcatgtttttaattgatgaaatttatgttagttgtggtggttgttcttgttgttattgttgtttgttttttggatttaatcaaaattctattctttattacattactaggcatgtgtcatttacacataaaaacaaggaanacgtagaccgttaaaagtaagttcatagaacataaaaataagtttgtacaaaaaacatcataagtcgaatacataataatataaaatatccaacagact

SEQ ID NO: 302758 - DNA, 422 bp, Glycine max
  unsure (1)..(422): unsure at all n locations
agcttgtntanaatatataagcaggggcaacttccactccagtgctcataatcaagtattgtcatttgagagcaaaacttaatgccttggtctaatgagcttcctgacaggttgacacggcatcatcattcttgaagccaaaacttaagttgactaacattaaaaatgttacgaatgttgttcataatccaataacaaatgagaaagaatgcttactaattccatagaaacaagaaaaagaatacacattcgttcatatttcacaatctcaataaaaaaacttgcctctccataatactcattntcagttgtattctagtatacaagattatacacaatgcaataatttcagaccatacanagagaaccncattagttcttacagacctatacaatacccatacagagaacttacattctat

SEQ ID NO: 302759 - DNA, 442 bp, Glycine max
  unsure (1)..(442): unsure at all n locations
ntacaacttaagaaaattaaatataaagaggatagagtctgcataagatagttcgttcaaaaattcataacttcaacacttttggtttggtatttataggcttcaacaacaagtgactgttgtgagtaaatgacattttttttttgcatctagaacatcgtctaaagtaggtgtttatttgagtattaaatgctgaatttaatgctagtacactccaagctaataaagaactctgcttatcttccttaagataaactttacaattgatttcaatggtcaaatcaccntttgcataacaatgacacatctttttttatgtgaagcgagactntaaaacttaactttgctctcactttcttcacttcgacaaatggtaggaagaataatcacatatttcccanaaanaaaggatcaaccaatatagagcattaaatgggtctta

SEQ ID NO: 302760 - DNA, 311 bp, Glycine max
  unsure (1)..(311): unsure at all n locations
agcttctattctgaatttcaagcgtctcgatgtactacaggacacaatcaaatatccgagtaacaagctattgtcgtttgaatctgcttagagcttctgttctcaatttcgagcttctcgatatattacgagactcaatcggacatccgagtaaaaagttatcgtcgttagaaatttctcagagctttcgttatcaattaccagttactcgatatattatgggattcattcggacatccgagtaaaaatttattgtcgtttgattctgctcagagattncgctatcaattacgaggatctcaatatatcac

SEQ ID NO: 302761 - DNA, 404 bp, Glycine max
  unsure (1)..(404): unsure at all n locations
ntgagcaaattcaaacgacattaactntntactcggatgtctgattcagtcccgtaatatatcgagacgcttgaatttgaatgccgaagctctgagcaaattcaaacgacaataactttttagtcggatgtctgattgagtcccgtaatatatcgagatgctcgaaatggaataccgaagctctgagcaaattcaaacgacaataactttttactcggatgtctgattgagtcccgtaatatatcgagacgctcgaaatggaattctgaagctctgagcaaattcaaacgacaataaattttaactcagatgtctgattgagtcctgcaatatatcgagacgctcgaaattgaataccgaagctctgatcaaattcaaacgacaantaacctttactcggatgt

SEQ ID NO: 302762 - DNA, 317 bp, Glycine max
agcttgttgacatgcggagatatatgtcatcttgcgctctcacaagatctgtcatattgacgtttgagtcacgctgactggcggagatacccgagtggttatccgtataaactttcttttgctatctctaagactcaaagcatgataccaagctgagtgggtaaacgcgcacaacatattctgcaccctttatcattcataatcacacaatatgagcgggtaaacacgcatatacatattctgctccctttatcattcacgaactacatgctgagtgggtaaacgcgtagacaaagattttgcgccctatatcattc

SEQ ID NO: 302763 - DNA, 414 bp, Glycine max
  unsure (1)..(414): unsure at all n locations
tgcttttggtttanatatgatttatacatgatttattatcttgtangatccaatttgagcaaaattggatgtgggtaagatggatttcgaaatctgctcaattgtgcagcaaanagctgtcaaattgtgcagccaacttgaccaaatgtgcagaaaaatgcttgtgcattgctggttatgggaaaggtagtacacattgngttctagacattttctagtagatcccaacggtcaaactgtagatttatgtactaggaacctatagtaaaattttcaagtcgatccaacggttaacgaattggaacaaagagaatgttactggngtatttgagtaaggaatgctataatatgtgaatgtgttttgggcagaagtttctgcctcttgcctgttttcttggtttaaggtagttcatg

SEQ ID NO: 302764 - DNA, 323 bp, Glycine max
agctttttatttgatgtttactttaccaactcattctatatgtttgctatgaaatagacgttgaagaattcgattaatctctaacctttcacatatatagaacctgctttgcacataactttgcacatgagagatgctgagttcgacctttcaaataatctgtcttcctagcgggttgtagtagctaaacaataacaagacacagagaccttcacatcttgattggagtctaattgtatgcgaatcctacacgacggatactcctagatgtgctatcagaatagtagctaccatgatgaaagccactttaatactggatatta

SEQ ID NO: 302765 - DNA, 448 bp, Glycine max
  unsure (1)..(448): unsure at all n locations
ctcagctntaggggtgaaagcacagaggccaaatatctaatctttactctgaagcgttcgtcccttatccagtttaagaccaaattagatgtgtttttggccaataacacaaaagaagatgtttgtgactttaaggtcaaaggtagttggttggaacgatcttgcgttgtttatgctggtgaatctaacaacatcgtagcccaggtaaaacgatctcctctgtttatataaccaaaacaatctctctttnnctttnntttttttttttttttttnaataaaaaacataataggttttaattaagaatttaatgcctatgctgatggtataatatcatttaattattactttaatataataattaaaaaaaattaagaaacttatcatatatctatgctgatggtataatatcatttaattattactttaatataataattaaaaaaat

SEQ ID NO: 302766 - DNA, 132 bp, Glycine max
  unsure (1)..(132): unsure at all n locations
tctccttcctcatcgtcttgcccgggatagtcgtcataattcgggagttccccctcaaaagtaggggcttggcttanatcttccggagtggcacggngagtgaagtccggaggtaagccataaggataagct

SEQ ID NO: 302767 - DNA, 494 bp, Glycine max
  unsure (1)..(494): unsure at all n locations
acgcgacggggctaggcgctgtgngcggtattgaaagcactcgacaancatagggngaattcagntcgcacccgggatcctctgaggcttctggattatgcaacctcttatcccgngcaccgtggatggtggtgaagctccttctttctgacttattccctattggatgacgcctcctctcacctcttttgctttatcttccgacgcactaccacggtggaaacccaccatcgcacgacctcattgaagctcacagacccagcctcatagaagcttacaagcaagcttacatcaagtgctaatccgagcacaagagcttccagcacgcgctccttaaccctccattaactttcagctttagcttcgtctccattgtcgttatccatttatctccatgtatctgctcacatgccttgtgctaaatgatgtgcacatgactcttgaacatctcaccgactaaacttgctatacaaagtagatgcgactttctatcg

SEQ ID NO: 302768 - DNA, 424 bp, Glycine max
  unsure (1)..(424): unsure at all n locations
nttaccatanacagcaatctttaaggnacattagcattaaccatgcaagagtaagttctccaagaactatggctgttaactgaaatcaccatacctccacaaaagttgtgtattagttcagatatctagatcacatgctgaggtatataatttgattntaacttatgggagaagctcaatctatgttaccttcttattttctcctataatggagaagttcatccaaacataacttgccataaatatatccatcaacttgcggaaacaagttaagattagcttatattgataatttcgcaaagaagcttattgttacaagccaaaaatataagcaatctttataagtctgaagatgctctgtggaagctaaatgctctaattgtaaactaaactactggccttggattttcacttctacctcaat

SEQ ID NO: 302769 - DNA, 373 bp, Glycine max
tctaccttatattcgatgttcactctaaaaatgcattttaaatggtttctattagatacacgctcaacaattcgtttagctctctacccttccacatatatacaacctgctttgccgataactttgcacatcacagatgccgaccttgacctttcacataatttgtcttcctagccgggtttagcagctaaacactatcaagacacacaaaccttcacatcctgactggagtttcatcgtatggcaatcctccacgacaaacatacaaagacgtgctcttacaataagggcctccatgatgacagccactctaatactggatattattatcatcctcccttataacacactaattgaggtcccaaataactcg

SEQ ID NO: 302770 - DNA, 378 bp, Glycine max
  unsure (1)..(378): unsure at all n locations
ctataaaactaagcttaacctagaggaccagactatccagtgttggttttatcacgacaatgtctacaagattgacttgcctagtgagtataatgtaagtgccattttcaatgtgtctgatctatctctttntgatgcagatggaggggccttgggtttgaggacaaatccttttcaagaaggagggagtgatgatgacataaccaagggcaaggaccatgaagcacttgaagggcctatgaccagaggcagacttaaacaagcccaacacatcatagagacaaggttggtcatttgtatagctgccattgatgatgattgaaggcccaagtggagaaagatgaatgcccagaggcagaggcactaccaagactacta

SEQ ID NO: 302771 - DNA, 397 bp, Glycine max
agcctgaagcattacttcaggtatactcctgtattttggcatctgtcttacatatgttcaccaatggttgatatttataggttgtgttaagatgtgtagatctagtggcactaagtctctctggaattgtttgatcttgcgattaagtctcactcaagctgctctgctttcactttagttaatgagataagtctaggttgttgttgttttgtgttacgatgtgatgctaattatgttatatctcatataatacaatatgtaacatattttctagcaaccgacaactaaacataaaaacttctaaagcataggagacaaatgcaccttttggtgcatattttatgtgctaaaaacacttggctttgcacaaggtgagatgcgacctcaaatatgtaat

SEQ ID NO: 302772 - DNA, 455 bp, Glycine max
  unsure (1)..(455): unsure at all n locations
tcacaaaaagagcccattntntgccaattgaattatgtttaagataatagagagaaaaaatttgttcagcaataaccctttatgtttgagggagaaaaagaacacaaaataatagaaaggaagccatcaaccaatgagctagtcacaattatccaatagtaccatcatanagaaaatgcaattaatataaaccccacctaaagaaatagctctaatttatactattccaatagcaaaactttnttaccttccattgctaatctcgttnttcccaatgaaaccaaagaaaggaccctgatctgcttcatcaagcttcttctgtttgaagtactcctgcaactccttagccttttgcctctgaaactccaatgtaatgacattcttatcatccccaacaacagtagctggcttctgaggnggtgaagaggatggtgatggaggctgagaangaagtg

SEQ ID NO: 302773 - DNA, 399 bp, Glycine max
  unsure (1)..(399): unsure at all n locations
ccggatcttaagcatgagcatgcagctaattgtaaaatctaaatgcagcatatgaaaatttgtgtaatcctttggcaaaggaaatgaatgattacaagagtagataaaactttctagtcctctagaattaatgtctaacttatttcaattggttgcataattcttagaggtctatagaaaatttgatgaatataatgccaaaacatgacacaggtgtgaagttgcagaattattctgcataatgttgagggttacgcgcttgtttgaccatctanagcccttacgctcggctaaatatgattctcttgtccccttcacatgtgatgagtgtaatagccaacatggtattcaattctaatgtgagtaaacttgtgccttcatagatataactctggaaca

SEQ ID NO: 302774 - DNA, 451 bp, Glycine max
  unsure (1)..(451): unsure at all n locations
tgtgtgaatattaatccaatttgaaacacccttgcgttttagaggcttgaaaatcatctctcaagcaaggatcaacagctgcagtcaatcatgtttggttggtgaaattgccaaactaggtgccaaaaggacaatattccaaattggcaataacaaacatgaatgattacaaagctcatgcttttgggttgactagtgttttttaaggtatcaatgtctattcacactagagatgtgtttgcaatttaggttgttactaacagagaactgaatcaagacctattttgcgctnttatctaatattttcatattttaagatcggttaaattgtcaaaagaacaattagactacagagaattcatagtgatccttatctttntggtgtataataacagttcgaatctaaatcatcaagcatctatttcaattcaccaccgttaagccgatcata

SEQ ID NO: 302775 - DNA, 368 bp, Glycine max
catgaagagatgaccttgaggagcagagaaggacttctcataagaggtaacgagctcacctaacgcatgttgaagattgcaaaacaactcgctcaccggcaccagcgtcgatgatgatgcctcattgtcgaagttcgaacaccgccacctgaggatcatcataaaacgaagaagccgaacaggattcccatgcttgaagcattgccgcccaggaggaaaaacactcattctaacgcatccactcgtaccacgatcgtgtcggaccatccatgtaaaacggcgccactattactactgtatggcgcgagactccttgatagtccaagaactgagatattctacatatccacaccatacggttgtgacct

SEQ ID NO: 302776 - DNA, 459 bp, Glycine max
  unsure (1)..(459): unsure at all n locations
tgcaacaatagaaagggggtaaatgaagagcaaatatctgtgacagctccattgaaccagcctgagtgacaaagaaagccccttcatccaagggaggtgatggaagtccttcttcttcatcatcatctacaacggatggattcactgaatctggtgtaccttcttctgaaccaacaaagcatttaataaagccattttcaaacgtgaaaaaatgccgaanaaaagggactaaaaaacagcgagatgaatctgattgtaaccaaacgaaggtagataaaatttctacctgtgatagctgtggtagtagtggccttaacccactcatccaccatttctttccagccactgcaaagtcaggaggaaaagtttagaatgcaagttgttcagaacacaagtgaacaaaattaagccatacaccananaagaataatagctaacttaagtagatgaaatgtgctt

SEQ ID NO: 302777 - DNA, 285 bp, Glycine max
tgcataacgagaatatccgtagaaaggctgtggcctgacttctggctgtaggatcattactacactcatctgggctagtcttgctcacactgcagataacagatcatatactatctatgttagtagctgaacgaatctgatacatttatgaattgttttggactctaggatgttgagccaatgacaccatggcttgatatagctgagtaactactcccacatctgcattgacagtctctggacatccatctaagggtgaaccatcatcttattctctcatcctac

SEQ ID NO: 302778 - DNA, 449 bp, Glycine max
  unsure (1)..(449): unsure at all n locations
tgctgaagagagaaggtaaaggtaacaaaatttggcattgtgaattgttgcaacacactcatgccattgtctatttttttttatatgtatacaaatatattagaaaagtaaaacaaaactgcttattctattaaaaaaaggacaattntcgttnttcaatacattaaatactaaattgattggcaatgctaattntaagaattaaattgatggctntctatttttactgttttccaaaataagtttagttaaggattcaagagtgatttttctttttttttttaaaaaaaaaagaatagcatttaatgttaccgatacttccacaccttgattntaataaaagtttcctaattgaaaagatattcctataaagaattaaaaatggacaattaaataataataaattntttactatcatccaatcataatctataatatatgataaattt

SEQ ID NO: 302779 - DNA, 301 bp, Glycine max
agctttgtaacaaagatattctattgcacttggcttagcccactaaataatagccaacaatacaaaaaaaatgaacatattagcaatggattacgtgttggggttagtacaagatcaacgggttcctaacacaccaatctaatacttcaatcaattaccaaaaggctatattggttccatttgatagttacataaaagtatttctaatatctgctgagaaaaagtatgatctattttgcatttaaaaatatacaatcataatccatagagaaaaatagatctatgtaacccaatgtgcatt

SEQ ID NO: 302780 - DNA, 446 bp, Glycine max
  unsure (1)..(446): unsure at all n locations
tgttcgcacatcattcacgtgtatgatatccactcgtataggtttgaagtataggagaccttcaatcctataacgcaacatggcggacaaaagtgggcagttaacttgaatggccattattgtcaatgcggaaggtattctgcgtttcactatccatgttcacaaattattgcagcttgtggttacgtgagcatgaactactaccaatatatggatgttgtttacaccaatgagcacatcttanaagcatactccgcacagtggtggcctcttgggaatgaagcggcaattcctccttctgatgaggcatggacactaatccctgacccaactacaattcgtgcgaaaggtcggccaaaatcaacaaggataaggaatctaaccaccgacaaaaatgtagtagatgtggagcagaagggcacaataggcgccgatgtccaatgcaa

SEQ ID NO: 302781 - DNA, 74 bp, Glycine max
caattcatatggagttttctttaaaatgggtcttattaaagccctatctataatgtaccacgcagtgttaatgg

SEQ ID NO: 302782 - DNA, 442 bp, Glycine max
  unsure (1)..(442): unsure at all n locations
ntataagcgcgggtctgggagacaaagttcaagaggttgcgatatgtgaagatgatgttccaagtacattggatttggtacgaccatgccttcctgatttccagctgggaaattggcgagtggaggaacgccccggcatttacacaacgagcataatgtaaacctttacggttttaaaagctctatagttgggcctaggctatagagtttttccttttgttaacgcttcgtgtcttttgtttttgaatttataatacaaggatctttcttcatttgttcctacgtctctacccattctcattcattngcatgtatacttctttttctgaaacggcagatccgatgacgagtcccccgaaagtactaatacctgggacccgcctatcgactccgagcaagaaatgaatcanacggatgatgacggacacgaggatgtgggact

SEQ ID NO: 302783 - DNA, 402 bp, Glycine max
agcttgttgtcattaaatcttacatgaatggccttttctacagtcaaggttctggagttatgcactctgtatgccttggacaattcaaagtattcaagtaagattctagaatcacactaggagtcaaactttccaagtttatccttggtgtttaggatgaaacgctgacatccaaatgagtggaagtaagagatattgggcttacgtctcttccataattcatagggacttctttaagataggccttatgtaaattttgttctataaataccaggaaacatttacagcttcaacccataaatctttgggagttgagtgatcgttaagcattgttcatgccatttcctgaagagatatctcttttctctcaacaacttcattctgttgtgctgttcttggagt

SEQ ID NO: 302784 - DNA, 431 bp, Glycine max
  unsure (1)..(431): unsure at all n locations
ntaggtagaaagacttgctntcatgattaannattttgttntattttttccccacttgaaataagcatgtataaaccaatccccaatcaaaatggctaanaattatatcgaccatgctttaaagaaactacaaatgttactggtttcctgtgagaatgtctttatggtgttttattgtcagactctgcttcgataaatttgtccataaaaagacaaataaatgagtttcttctataatttaaaatcaactatgcacaacattnttaaattttctctcattctaataattgtctaanaattaagaacatgagttaattntagcttattggttaannatcaatatatttatatattnttttntattntcttcggtaagtacttgtgaagaagtttatcanagccttaattagcacttagcatcangagtcatt

SEQ ID NO: 302785 - DNA, 390 bp, Glycine max
  unsure (1)..(390): unsure at all n locations
tagcttctacaagaagagatgacccagaggatcaaagatggacttctcataaaaggtaaggagctgaattaaagcatgttgaagattgcaaaacaactcgctcagtggcaccagctcgatgatgatgcctcattgttgaagtttgaacaacgccacctgaggatcatcataaaatgaagaagcaaaacaggattccaatgcttgaagcattgccgcccaggaggaaaaaaactcattctaaggcatccactagtaccaagatagtgttggaccatccatgtaaaatggcgccactattagtagtttatggtgtgagactccttgatagtcgaagaactgagatatctaaatatccaacccatacggttgtgacctgcanacgttgggaca

SEQ ID NO: 302786 - DNA, 428 bp, Glycine max
  unsure (1)..(428): unsure at all n locations
tgtaagtcacatgttgaacccattttttgtagtagatcaaatcaaggtcttggaagtaggagtggaccaaagagagggagtgatgttgaagttctggtttatctttgttgggttcatcttcaaggcttaagtgaaaatcattatttcatgcctttcatttgaactgcttgatgatcaacaaagttaaagaaggtcttctgtttgagaggataacgtgttagctntagtttagtcacattactattgaagataaggttggtgtttttgtacttactaatccctttcaggggaagcgacattcactaatggctggcatgaatttgttaggaataattcacagttntaaaaagctgtaaactggtagttataanggtggttaagtttgttttcttataaccaacaagcagttactattaacctgctatata

SEQ ID NO: 302787 - DNA, 326 bp, Glycine max
agcttaaccattatatgttttattttcttgcataaagaaaataaatgtgggaaggctgtggcatgatctttggctctagaatcaagaatccactcatcttggctagtcttgctaacactgcaagtaacagataatatactacctttgttagtagctgtaccaatctgatttatttgtgaattgttttggactataggttgttgtggtaatgacatccaggctttatattgttgagtagttaatcttacatcttcattttgcgtctcttgatttcgatctaatggtgaaccatcaccttcttctcttatactactagcattattgat

SEQ ID NO: 302788 - DNA, 450 bp, Glycine max
  unsure (1)..(450): unsure at all n locations
tgccagaaagganaacaagtaaaaagttcttttaaagtcaaaaatgttgtttctacttctaggcctttagagctcctacaccttgacctatttataccaactaggacaacatccttctatggacgcagatatggtctggtcatagtggatgattacactagatggacatgggttaggttcctaacccacaaggatgagtcttttgataccttctataaattttgtaaaaagatttacaatgaaaaaggtatttgtatctcttcaatcagaagtgaccatgagggagagtttaaaaatgatatttttgaaaaaatttgtcaagagaatggtattcaccacaattttccactccaagaacaccacaacagaatggagtttttgagagcaaaaatagatctctttaagaaatngctangaccatgcttaatgacccacccaaccctaaatact

SEQ ID NO: 302789 - DNA, 418 bp, Glycine max
  unsure (1)..(418): unsure at all n locations
agctttctttcncttgtttttgcacttcaattattattcaaaaaaattcatcaaaaaaagaaagcgcgcatgtggctacatggatggaaagtaatcaagtactgaagtgagaacttgtgccccccaaaatttgaaaccttcacaaagtagtgttgaaaatgattaaatcattccaagctcatccgcttagccctaatgacaatatatctgggacaaaaccaaaagaaagaaatatataatataatcccgctgaaacagttagtgaaatttgtcaaatttgaaatatataatataattcctgatatattttttcttccaatttgattgggagacaaccaaacgacagacatacatacattcaaaatccagttgcttaatcacatgagctacaagtacatacaatacaattaatatccaa

SEQ ID NO: 302790 - DNA, 468 bp, Glycine max
  unsure (1)..(468): unsure at all n locations
cgccgccgcgnttcaancgttganncttgagcccgttcgtgctacaagcgactctataggaatctgaagactttatgagagcacggcttagtggatagaatgctcggttatggcagcggctgctgtgcacactggcacgatgaaggacgagatgaatgcgccgagccatctctctctagatggagcccgcacgatgacctctaacgctgaacacggcacattacatctgctagcacctcgctatggtacacagagcattgctcgctctataactatggcggagaagcgcattgaccctatgccccctcacccacactctggacgtgtctagcatgacacaccaaacatcgagtggtaactgatcatactctcagaccggattctctcaccctacgttgacatgacgctcccatagcctatggactccctgagatatcggccagatcagctggcgcgcagaccttcaaa

SEQ ID NO: 302791 - DNA, 383 bp, Glycine max
gctttaatggcctagtgaggatggagaggcgcaactaagaagccagtggagtttgatatctccattgaacagtacaatgataaggtgctttgtgatgttgttactatggacgctagccacttactcttggggagaccatggcaatttaataagagggctaatcatgatggtttcaccaacaatatctctctcacggatcaacgcacaaagatgtgctctaaccattgagtccacaagaagtgtgtgaggatcaaagacaaatgagagagataattcttcaagaccagagagacatagaaaacagagccaaacacttgagagttcaaaaagtgacgacaaacagagggaaacacacgagaggacacagatgagtgaaacacttg

SEQ ID NO: 302792 - DNA, 437 bp, Glycine max
  unsure (1)..(437): unsure at all n locations
tgccacccagctcgcccaggcgagcagggttgcttctctccagaagaaacagccttctggaggaatcttctggagagcccaagtgggcctggtttgctattgcacccccatttttactaagtacaccccttgccttttttttggtgattctttnttcgtaaagttacggaaacttacgaatttcgtaacgatataaagagatttgttatatagaccgtgttgatatatagaccgtgttgatatanagaaattntatttagcattgtaactacggtttacaataatgccatanacttgaaaatcctgatgagtcattagagacatctaacaacaactntcanaattgccccatgtgtggtgtcacttgtcagtgttaggattcaacaagcgattcttctcanatttcagccagcccgcatcaataaaccttgcacctt

SEQ ID NO: 302793 - DNA, 200 bp, Glycine max
agcctcatgaaaaatcttatctctcatttttggagcatcaagaggactcagcataattcagaacggggggatgaattaattattaatgtgtcctgactaactaaaaattatccctcttaatattactagattcaattacgcttttactactacgttaagaaactaaagaacagaaacagacacttagccaaaagtacaat

SEQ ID NO: 302794 - DNA, 430 bp, Glycine max
  unsure (1)..(430): unsure at all n locations
ttgatggtgttgagaagaaatcacatgtttgtcatcttcaaaatcttcatgattaatttgatgatgtttgtgaacttttgaatgagtttttgatgctttgttactccttaaatatttgactttcattaatatttttttatttatttattatcttataggtatgtagaaaaacctgaaaattatcctgtcataggaacaaaatgggtttttagaaataaattagatgaacatggcatagtaagaaacaaaacaatattgctttatccattgctaaagcggaatatatctctgccggcagttgttgtgcacagattntatggatgaagcaacaattatctgactatggtatccttcttgatcacatacctattangtgtgataatactagtgccataaatctatccaaaaaccctgtacaacattctcgaat

SEQ ID NO: 302795 - DNA, 323 bp, Glycine max
cgctttatgatgcatcaagattgattcagtgaagtttttgtgataacaaaggtgatgacaataagcttaaagatcaagaacaattgatgataacaaagatgatgatttcaagactcacatatcgagttcacgatgttcaagattgaatcaagaacactctatggctcaagaggaaatttgatttcatgaatccagaatcaacattcaaggttccagcttctccgaatcaatatcacgattcatgactcatgattcacgactcatgagaagacttaatcctgtatagtactaaaaagtttttcactaactgagtatcacatggc

SEQ ID NO: 302796 - DNA, 288 bp, Glycine max
tttgctgcaagtttcatgtcactgagttaattacgatggctatatgtttgttgcctatgtgatgaccatttgtcctaatatcaacacatcttccaaagattaagattatctgaagctcatttgcaaggctattaactgcattatatattgtaacaacttcatgacatctatttttggcacagtttcattcaagatacatatcgtaataacttcattatctctatgcttgccccatgagttctttacatatgatttattcactcggccttacgttaagactacatgtgc

SEQ ID NO: 302797 - DNA, 270 bp, Glycine max
agcttatgggcagatacgagcatgtgctaggtccatgatctatcaatgatcatcctgcgtccagctcatgacgttaaagagtctatctccctgctttaattttgttctttagaactcctgcttttatttatttgcctattttcttgaatattatctgaatttgcctatttatctgtgaccataggagtctaaaaaatatatacatgaccaggaatgatcaaattttgcaaaacaataaagggggttagctcgcctgcgcaagcatgtctg

SEQ ID NO: 302798 - DNA, 367 bp, Glycine max
agcttcttgagacgcgtacctagatcgatcaactctaacttgggaaggtgtagtacgagccttccttttcttaaatgccatctgcaagacattagcacaggttagtttcacacaaaaacataaaaataaaactgaaattttgatatgtgcttagcgaagcatgtcgcgcttagcgcgccttataaaattttacttatgggataagcgcagtagactcgcacttatcctgaatacacaaaatatttcttctgtacattaagcttaccgcagcaagctgagcttaacctaagtccacaatctccaaaatagaagagagttggagcttagtgtagcatggcgcgcttagctatcgttatcagaatgacac

SEQ ID NO: 302799 - DNA, 64 bp, Glycine max
actcaagctcacattccactgtctacgtgcgacgcatatccctccctctgtagatattattttg

SEQ ID NO: 302800 - DNA, 411 bp, Glycine max
  unsure (1)..(411): unsure at all n locations
agctttgcagatttggtcttcgccagtgaaaggatcgatgtgggtctgaaaaaaggcaaatttgatcatcctactaggacgactgagaaaactggggcaaataaagagggtgaggatgagggagaaacccatgctgtgactgccattcctgtacggccaagtttcccaccaaacccaacaatgtcattactcagtcaataacaaacctcctccttacccaccacccagttatccacaaaggccatccctaaatcaaccacaaagcctatctatcgcacttccaatgacgaacaccacctttggcacaaaccaaaaaaacaccaacaaaaaggaaatttgcagcaaanagcctgtanggttcaccccatattccgttgtcatatgctaaacttgatcccatatccactcaat

SEQ ID NO: 302801 - DNA, 54 bp, Glycine max
tctcgatatattatgcacatgaatcggacctccgagtgacaagttatggccatt

SEQ ID NO: 302802 - DNA, 236 bp, Glycine max
agcttttattaaacaaaatctgggactgactgacgaatttattctgaatagcaaggctcttaaataacataaattgactaaatggagcggtcctgctctcatatgttacttctatagttttattacacaccctttacaattgactccctgactcggaggtcattttcactctaatagccaagcctttaaacaaaattcagaactgacttggtcgacctcagtggtggaggtcttaa

SEQ ID NO: 302803 - DNA, 368 bp, Glycine max
  unsure (1)..(368): unsure at all n locations
agcttgttgacacgcttatactaacgttgtcttctgcaccttgtgtcatccagagacggcgagtctgatgacatgcgagggtaccttatggttatccgcaccttttgtcatccacagacggcgtgtccgatgacattcgggggtaccatatggttattcgcacctttcgtcaaccaaggcgaatgagtccgatgatatcgggatgatgttggtcgtccgattctgattattctttacaatcttttcagcttttactttcatcatccagagacattcaatcccgacgacgcataagattcttctctgctatgcagggacgatcgagttcgatagcatgtgganacgtcgtggctatccctgtttatcgc

SEQ ID NO: 302804 - DNA, 392 bp, Glycine max
agtttggctctggccatcagaaccatctcattctctacttcatccatcttggaataaacattcctgtcaagtgagtgtctttttgcatcaaacaaatcaaatgtgatcttctgatcatctattcctatttccagattacctttccctatatccaccacacaattggcggttagcatgaagggacaacctaaaatcagaggggattcagcatcctcttcaatgtccatgatcacaaagtccacagtgaaagtgaattgtcgcaccttgaccaatacatcttcaaccatgccataacgccttgaaatgtaacgatttgccagctgcaattcattcttgttgcataatttcagctctccaatcttttgcacatgagagcggatcaaataatacta

SEQ ID NO: 302805 - DNA, 378 bp, Glycine max
agcttgcacatcttctcgatcaggttgacaattcaaatctaattgtcccttggcagcttcagccaccgcatggttttgactccttgaatccaattcattctgcacccgtacctcattctccaatctgtcaactggagttaaatgtcgtaaggtgctatctacttctgattcatctttggtccgccatgataactgatttctctgagcaatctctgcttcacgttcggattgccgcttcttctttcgcatcatcagggttttaaaccgacgtttaactgtcatgcacacattgcatgtgcatgtgggtttgtgtttgcccttcccacttggtggctggatacagacaatgcatgagcacccaggtctatgccgaggatg

SEQ ID NO: 302806 - DNA, 257 bp, Glycine max
agttttgattaataggatatgggatgagagtgtgaaacgatatcatcattacccctatcttattcaaaaatctgttaggattatatagctaaatttgaactaacttaattaagatttgatgggttccacataatattaaatggttttattcctgaaaacacattctcacttggttttttttttcttttcaaattacatcactctgtagtttaattttcaatgtacactgctttacactttgttctttgattaatacc

SEQ ID NO: 302807 - DNA, 387 bp, Glycine max
  unsure (1)..(387): unsure at all n locations
agcttgtaaataatcttagatagaagtgtgaaattaagttcttgagtggaatccctcttctaaggagaaaatctgtaatctgtgtagttaatcacagacccttttttataaagttcagaatggctggcaaaagagaaatcaagtggtgtagttggtttaattaaggctaggatgaagtctaatgaggaattggcacgtttttgaaacccagtggtttgttggcctagtattgtactgattgtgttagtgaattctcatctttaacggtgacgattggacatagcccaaagtttatgtgaaccaatattaaaacctttgtgcaccctntccttntctttttctttactttactatgcacaaatatgaaaattggttttgatcacatca

SEQ ID NO: 302808 - DNA, 234 bp, Glycine max
atagcttcaaccctataacgcaacgtggcggacaatagtgggcagttcacttgaatgggcatcattgtcaatgctgaaggtattctgcccttcactatccatgttcacacattacttgcactggtggtacctaagcatgaacttctaccgcatacagatgttgactatacatatgagcccatcttacaagcttactccgacaatggtggccttctgcgaataagcagttattct

SEQ ID NO: 302809 - DNA, 395 bp, Glycine max
agcttggatggctatcttgcaagagtcctcaaggcttgccaaccacaattggcattgcagagtagcaatgctcgccgcataagtgatttagaaccgatactttaaaacatcttatctcacccattcatagccagcaacagtaaaaggacgatggtgacccagcactgtggttacgccgcacatagggggatgccctatcgtccctaccaccactcttccttgccccgaagaacataagggagacaaattatggtgatcaaacaagttcctcgaccggagaagcagcggaaggctacaccctcccatgatagtaagaagtgcctccaccagcatggtgtgaaaccctcaacctctccaaggaagaggagtcgctatcagaaggcccacgacgagtc

SEQ ID NO: 302810 - DNA, 57 bp, Glycine max
ttctcaaaatccacttccaaaatgagactagctttattccctctcctttaatcatcc

SEQ ID NO: 302811 - DNA, 279 bp, Glycine max
agcttctgtctttactttgaaccggtcctggtctatccacttgtggaaccaaagaaaatgaaaacaaagcacttcttctatccatacttagagaacttgcgttcttgttccactgggaaaaaaccagtccaatgaatatggtcaagtgttctacgcaaaccatatgtattgacagcttcattagcagctctaaagccaccaccaatagctggggaagaatcattggccatctgattcttgacaaattcacccaatttattttccacatgagattctgcc

SEQ ID NO: 302812 - DNA, 57 bp, Glycine max
tggagaggaaacttcaatgaaagaagagaatgagagtttatcaagaatgtggtgtga

SEQ ID NO: 302813 - DNA, 409 bp, Glycine max
  unsure (1)..(409): unsure at all n locations
agcttccaagaatcaagatcaagattcatgaatcaagagaagacttaatcaagataagtatgaaaaggttttttcaaaaactgagtaccacatggatttttctcaaaacatatttaccaaagactttttactctctggtaatcaattaccagattattgtaatcgattaccagtagcaaaatggatttgaaaaagttttcaaatgaatttacaacgttccaattgatttcaaaaaagctgtaatcgattacaatgttttggtaatcgattaccagtgcctttgaacgttgaaattcaaattcaaatgcgaagagtcacatcctttcacataaaagatntgtgtaattgattacattgatttggaatcgattaccagtgattggttctgaataaactaaaagatgtaact

SEQ ID NO: 302814 - DNA, 59 bp, Glycine max
  unsure (1)..(59): unsure at all n locations
tgcatcattntactctgatatggaaaccaggatggaaagaaataatcgggagaacttac

SEQ ID NO: 302815 - DNA, 357 bp, Glycine max
agtttgtctattccactccagcataagtgtcttttgctcgtagtaatactatccatctcgaatataattatctttatcttattccgatgatattctttatctcatgaaaaattttaaccatgattctttaataaaagaaatgacatttattgatttggcactttttaataggaaccatgttcctacagcataagtgtctcagtttgaatagctctggatttgattgatcttgaatccctggtttggtattatccaattgtgctttatcttaccaccaccgccttgcgtcggcacgtgtctttgaagacggaacgtgagaagaagaacgagctgcactttccactaagaaagtatgcg

SEQ ID NO: 302816 - DNA, 389 bp, Glycine max
  unsure (1)..(389): unsure at all n locations
agcttttaaaaaaaaagcctgatagacctctcaggctgacctgtttaatatgtgtgtgtgtgtgtaaacttttcttgattcttatttcttatttattttagtatttgacattaagactagattatcaaatgaaacttatggtattttacttagcttgtttattttggtgaatacttaaagtgcttcgattataattcttacttgggttgttgtgattagtgaattttaatctcatattagagtgctctaattaattntaactttttttttcatgcacaaactaaaagggaagtatgtgtctttctttatattaaatcttaaaaagtacaatacggaattttcanaattttactatatagtcattagattcccttcatatataatattca

SEQ ID NO: 302817 - DNA, 397 bp, Glycine max
  unsure (1)..(397): unsure at all n locations
agcttctggatatactatgcatctgaatcggacaaccgtgtgacaagttatgactatntgaatctctcgagagcattccttattcaatttcgagcgtgtcgataaatcatgcgcctgaatcggacattcgtgtgacaagttatgactatttgaatttctcgagagctgccggttttcaatttagagcatctcgatatgtgatgcgccagaatcggacatccgtgtgacaagttatgaccatttgaatttctcgagagctttcgatgttcaatgtcgagcgtctggatatattatgcgcctgaatcggacctccgtgtgacaagctctgaccatttgaatctctcgagagcattcgttgttcaatatcaagcgtctcgagattatatgcgccttgatc

SEQ ID NO: 302818 - DNA, 336 bp, Glycine max
agtttgcttctacaattatatatacaagtcatttgatatctatgttaacagtgggacttgaaactaactaacaaatatattaaaaatattatacacgatgactatgaagtgaaatatattagcacgagttgatgaatacagccaagatattaggctgtagggatattcattgtggctccttccatatataagtcgttgcataaattgacttggatcacattagctgaaaaaaacctagtgtgggatggataaaagacaattgtgatgaagggtctttgagggaccacactactacaaaagcagcattctaagttggttataaacggttctctatgt

SEQ ID NO: 302819 - DNA, 295 bp, Glycine max
tctgcatgcaagcttgggaggattgatggggacccggtgttgagagaaacgaggatttgggctacatgggagtacatgagctcagttggaggtgggcaacaagggatggtaggtttatgcgcgatttgtggatgtggaaaatttgttgtgcaccatcgcccgaccgccacctagtaccacatgtgatgggtaccccataatgatacaagcttgagatgaggaagtgtaaaaaggtgatacttcctgcttttattcgttgaccacagagtggtacctggagatatgttgtgggggt

SEQ ID NO: 302820 - DNA, 315 bp, Glycine max
agctttaaaaattgtttgttctaaagttatagtgtcgctcttatttaaggggagtatccagctattccatcaactgaatatccttctagtgtaataactaatgttacaaaaaccaagaatcataacttcgaatcttttccaatggaggtgtcaatattcaatagcttatcatgtctcaagagaatattatcttcttgaagaaacaagaactaattatcaatctattattcaaattattctaaaatattcaatttgatctccaaatttataatcaatttaattcgattatcacatgattgtaaaaaatatatcaat

SEQ ID NO: 302821 - DNA, 390 bp, Glycine max
  unsure (1)..(390): unsure at all n locations
agtttgtaattgattaaaagggaagagattatgattgatcttccttcacccagtttattttatagtttcattaattaattacaaatacgattgtaggacaaaaattaactataattatatttaaactggtcaatttagaataaattcggcaggaaaaaaaatgaaattaatataaaaatatgggaaacaaataattcaacgcatatttatttgaactgaacatagaaaaaaagacaaagaaatggaaggtcatttttgcaccctttntttaaaatttttgtctgcgccttactatccgaaaacaaaaaaaaaatgttagataatatctcattctatttcgaanagaaaaatatattaaaattaaggtgaataatgatatatacatataat

SEQ ID NO: 302822 - DNA, 409 bp, Glycine max
  unsure (1)..(409): unsure at all n locations
agcttggatgctgcttgatcaaccttagccccttgttgatgccattagaatcattgaagacatgtgctctaaccccgacaacaactcaagggatatgaggattatgaagaaaggcatcaattagatgaggatggattaatcccaaactaaattaggaaagcagatacacgctctatcactgaagattgagacacccatgagagcttaagctcaagtccccattacaaaaccttcattctcaacctataataaatgtgggattatgcatgttccaagagaatgcattattgatgaaagctagtggcaaccatggatgagatcaactttgttaggggaggaaataattcttatagttagtaccccaacaatntcaatcanaaatagggcttcaggcagagtcagggaatgt

SEQ ID NO: 302823 - DNA, 57 bp, Glycine max
tcaaaacctcctcttcatcaatgtccagatcagatactctacggtgcatgctataaa

SEQ ID NO: 302824 - DNA, 409 bp, Glycine max
agcttgtaatcctttatataagctaatgatgcttaacgaaaggggagagaaaaatattttttctctcatcccttgagctagcttttgggattgagttagacccaaactcacattctaaaaaatacgtaggcatgcgccattacttggtttgcatagaagaaatgtgacgaataaacgtggacaagttcttagaaagagagcatcgagatcacgaagattgaaacgattcttgtgatcttcttcatctgttactctctctattcgaacttgtgctctttaccaaggttatcgagagtctacgtagactcgtgagagtttcatagactcgactcgtagactcatttggtataatctgcttcatataaaaattataacaaaatatttatatataacatactaattatacatt

SEQ ID NO: 302825 - DNA, 387 bp, Glycine max
agctttgcggaattggtcttcgccagtgaaaggatcgatgtgggtccgaatagaggcaaatttgatcatcctactatgacgactgagaaaactggggcaaatgaagagggtgagaaagagggagaaacccatgctgtgactgccattcctatacggccaagtttcccaccaacccaacaatgtcattactcagccaataacaaacctcctccttacccaccacccaattatccacaaaggccatccctaaatcaaccacaaagcctgtctaccgcacttccaatgacgaacaccacctttagcacacaccacaataacaccaacaaaaaggaattctgcagcaaaaagcctgtagggttcaccccaaattcggtgtcatatgctaaa

SEQ ID NO: 302826 - DNA, 309 bp, Glycine max
agcttgtgggattatgtgatagtgatcttgccagacatgctgatgatatgataagtactactggatctgtattctttatgggcgattgagtatttacatggagttctaacgaacaaggcattgtgacactttttacttgtgaagtcgaggttataactacaacttcctgcacatgtcatgccatttggctaagaagattgttggaggaacttcagttgctgcagaatgaaagcaccaagatctatgttgatagttgatctgcgcaagagctcgccaagaatccggtgttccatgaacgaagctagcata

SEQ ID NO: 302827 - DNA, 397 bp, Glycine max
agcttgagatgaggaagtgttgaagggtgaaacttcctgctcttattgttgaccacagagtggtacctggagatatgtcgcgggggtcaggagaccttggggacgtcaggtggggtgctattgcccaaaaccaagcttgaccaatcccgacccaacccgggcatagtcggtcagtgagaacctgtgatgtacctaagcatgcgagctcctggcagtcaacagataaaaggaaaacaagaccacaaagcaaggaggcttgtggtggctggccagctgtgaattttgtgtaatatgtggattgtggcctctggtaatcgattaccaatggtgggtaatcgattacaaggcttaacaatgaagacaggaggctaagatggtctctggtaatcgattacca

SEQ ID NO: 302828 - DNA, 389 bp, Glycine max
agtttgttcacatattattcgcatgtatgatatccactcgacaaggtttgaagtagaggagactctcaatcctataatgcaacgtggcggacaaaagggggcagttaacttcaatggtcattattgtcaatgcggaaagtattttgcgcttcactatccacgtttacacattattgcaccttgtggttacgcgagcatgaactactaccaatatatagatgttgtttacacaaatgagcacatcttaaaagcttactccgcacaatggtggcctcttgtgaatgaagcggctattcctccttctgatgacgcatggacacttatccttgaccaactacaattcgtgcgatacgttggccaacatcaacaaggataaggaatgagatgga

SEQ ID NO: 302829 - DNA, 396 bp, Glycine max
  unsure (1)..(396): unsure at all n locations
agcttttctaacattatatcatttgtagggtgtgaacttgcacccggatccagacaagatatagagcccaatgttttactcatatggattacatgatcaatatgagtcatataaattaactcatacgaattacgtaatccgtatgtctcttatagattatgtaatccgtctgtacataatccgtatgactcatattatgtaatttgtatgagttaattcgtatgactcatgcgggatcacgtgattcataagtattttttttaatcttttttttcaaaaatatgtcttttaatttattaatatattaaaatttttaatagtaagtattttttatttataaaaaatatactgattaaataattcatatgaattatatcanaattaattgttataaaa

SEQ ID NO: 302830 - DNA, 51 bp, Glycine max
tgagtatattttttgttgtccaatgttatagtacaaatgttcaatacttgg

SEQ ID NO: 302831 - DNA, 320 bp, Glycine max
agcttatctatgggggcagaatcactctcattaactcagtcctatcagctctacctatctacttactatccttctttaagatccctaaaaaagtggtgcacaaaattgtttccatccacagaaatttcctttggggaggtcatcaagaggccaacaagattccttgggtgaagtgagacacagtttgtcttcctaagaacaaagggggcctatggattaaagatttatctaaatttaatgacgctctacttggcaaatgggggtgggagctggctaataatcacaaccaaccttggactagaattttactttctaaatat

SEQ ID NO: 302832 - DNA, 388 bp, Glycine max
  unsure (1)..(388): unsure at all n locations
agttttatttaccaggaaaattatagagtaaattaataacaagaaaattgtgatttttgtaattgtataccattgcatatagttgaacaattaaatttaatttttcacatattgtatgcataccaaggtaattactaatgaaagtatcatctttattatatatttcattaattaaggatatacatattagttaattcaaaatatatcttccctatcattgacgaaaaagggtcaagggagaataactttcaaaaaagcattttttttgttaagaggtttttttttctttntaaaaaagtattcgaaattaaatattaaacaatntccatataataataataataagtagactactagtagtagtattagtattattaaatgtaattaa

SEQ ID NO: 302833 - DNA, 266 bp, Glycine max
agcttgcctgtccgatgcagcagtaatgatggcccgggttatgttggggaacggttaccaacccggaatgggtttaggcaaagacaatggcggcataactagcctgaataatgccaaaggaaatcctgggaaatatggtttaggctataaacccactcacgcggatataaagagaagcatcgctgggagaaagagccgtggtcaaagctcgcggctgagacaaaaaagtgaaggaggcccgccctgccacataagtataaagctta

SEQ ID NO: 302834 - DNA, 57 bp, Glycine max
  unsure (1)..(57): unsure at all n locations
ntaaccaattcaggataaataggcaattgtaatgacattaaaggtagtatacctaag

SEQ ID NO: 302835 - DNA, 396 bp, Glycine max
agcttagcattcgccttttgccatgatgtgatctccttcttgacagtatctcatcgagttggagtggtatcacagcattgaactatgttgatcgttccaatgggatgatggttttgattgctgcagataaagtgtgtcattgtgagtttctggtcccatgagttaaactataacgactacaaaaaatattgtcgtatctttaagggccaaaaggataattaaaccttctatttctttataattcttttttaccacgggttatatatatgtagcagtttattctaaacaatggactacgtgtgaaatctttgaattctatgtaagacatgttatttcaaatttctcattacgtctcatgtcaatgatgcatgctccattcgaattctatgtctaatt

SEQ ID NO: 302836 - DNA, 57 bp, Glycine max
tatctgatttggccttcctcagtttcctgaatctattataccacaacttatcaggca

SEQ ID NO: 302837 - DNA, 362 bp, Glycine max
agtctttatacgggcatgtttgaagcccatttgtgatgaattccatgtttctctttgaagatctcaatttaaccaaggttcaaagacattaagaagacctaacgtagaagatttattacagattacaatgagaatacaacatcaaaatgaagttgtaccttagccagcatcataatggtgtatttgaggagtctgagactgagaacatcagaacgatactctaatgatcgaccattatcatgactcgacatattatgagacgactacgttagaatgacgcatcgtagtctctcatgccgtatctatgcatcggaacgatcaagcatctacatgtcttccatatgaaatcacagatgatagct

SEQ ID NO: 302838 - DNA, 372 bp, Glycine max
agcttgagtcgctgatattcacctagtccatcatatttagttcgccgattctacacgtctccaaacggaccgaatctccgtgactctgtctctatgctagttcgtgctacgtcatttttcactctttttttatagtacaaggaatattctatgcgtcttttttatctataaaagatttcattgcatttttcaaagcttatttttgacttataggccttatgttttggtataccgtatacttgtaccaagttctattaaaataaattgggtattacttttcataaagagtacagatattcttatgtggcaatgccaatttttcctcataatacataacctattaatacttcaacattttttactcctttattt

SEQ ID NO: 302839 - DNA, 54 bp, Glycine max
atagagaggaacacaaccatcaacatttaattcgtcgttaacttactttatggc

SEQ ID NO: 302840 - DNA, 399 bp, Glycine max
  unsure (1)..(399): unsure at all n locations
agtcttaacaaagcatatgatcgcatactcagagactgagaaccccacgactcccaatacacgcattactctcctctcgtacataagacgtacaacttatatatttcatacattacatatataaaacatagaacataacccatatgtttcatacatcatatatataaaacatataacccatacatcgcatatatataaaacatacaagtagcaatgatatggttatcacctctaacaaataaagccaaatcatgacatctaggatgtatttaaaattgcaacccaatacaacttacaggtcgcccaaaattaaactacgacatgtacgctgcaaaagggaataaaatanatcatagcacatattctatatctaanataacaataaactaaggtcacaac

SEQ ID NO: 302841 - DNA, 364 bp, Glycine max
agcttcacctcagcattctaggtatgacatatgtaatttgttaattcaatcatattactttgatacattactgaaactcaaatgtatgttaaaccaactacctgtaatttcgaaatgaagtccatttcaaccatgccataggatataccaaggctacaaataaaagtatattgaacatttgaacctaaagcatatatacacccttatttatgcacttcatttagaaataagttcactttacgcaacatttaaaggcataataagggtccttgtgtggtacatttgtttaccttattggcaagagaactgtgacttatgtacaagacgtagaatcaagacttcatcccatgacacattttgtatc

SEQ ID NO: 302842 - DNA, 397 bp, Glycine max
agcttcaaacacttgggtaatcaattgcgatcagcatgtaatcaattaaaatagagagtttttactttagaagaagtcttctaactttggaaaccttctcctggctcctacatgatgatgcatgatgcatatatgaaatgatagagactaagatgcaacacataatagaacaatcaataccaatgtcactcaagagagttaggcatgtaaaagacaaaacttcttcaagctcttctttatgcttcaaggctaagtcttcatgttgctccctctatctctaatgccttgagtatcccggttatgcacgggcgcctgttgacttatgcttacgtgtagattccacattgcgttgggtgtaagagataactactatgagtctaggacctttacttctata

SEQ ID NO: 302843 - DNA, 371 bp, Glycine max
agttttcaacagtcccaaaacccaatgtgtatgcgcaaccaagtgtcatgatttctatattaccaattttgctagttgttaatgttgaatcatagttttgctctctcatctagcattcgtctcatattgtaaacctatttcgtgtcgtccagatttaaaaaaaacttctcttactttatttcaaaatcattcttctgtttaccttacaactcactcaactctatcattaccctttttcaatatgcataattaccaacatgcaaacatatctaatccagcagatggcaccatcaataggcaagctatgatccagaagcagcgagatgcctcatctcccatttctttcatcttctaaatttattggaccttct

SEQ ID NO: 302844 - DNA, 357 bp, Glycine max
  unsure (1)..(357): unsure at all n locations
agcttcaaacaacttgttgtaatcaattatgacaactctgtaatcgattaaaacatagagtttttgcctttgaagaaacttttctaacttagaaaatgtccttcacacacactatgatgatgcacaatgcaaaacaaatatcaaatgtactgagatgcaacaatcaagttaacaaccaatacaaatgctactcaagggagttgggcatgtaaaagccaaaacatcttctanagatccttcanacttttcctcgagcttcaagctttagccttaggttgttccatgttgctcatgtttgctgctccctatctntaacacccgcggntagtgatntcataatcactaatacctatgatg

SEQ ID NO: 302845 - DNA, 54 bp, Glycine max
  unsure (1)..(54): unsure at all n locations
tctgaantttgcttcaagaaatacacccaagtcttcctatcaaaatcatcaata

SEQ ID NO: 302846 - DNA, 381 bp, Glycine max
  unsure (1)..(381): unsure at all n locations
agcttgtaagaaatatttcaccacagaattgctgcattgatttagatctctatttctttggtcactcttgagacaaccataacactcacctcataaaaaaaagaatacgatgtcaccaacatcatcatggaacgtgtcttgcccgtattatgccttatcactcttacattcacaatccaaggaagaccatcatcttgaaaaccaaagacatggaactgaataacaagaaaataatttatgagaagacgataaccgtacatacctaccttcttatgtggaaacagagaattgagatagatgagacangataacacgatttatacaacttacacaattgcctctagataccaaggagtatttagcaagataagaacagatagc

SEQ ID NO: 302847 - DNA, 57 bp, Glycine max
tattgctattcagaagatctagttttcatggcttaatttgattatgatatgtcctat

SEQ ID NO: 302848 - DNA, 384 bp, Glycine max
agcttaagccattaattatgactgcacgtttgatctattgcgtgaaacttgcacacacaagacaagaagtcaaaaatcaattaatcattgcctgtagatgttaaacctagcatcattcacgcggttttatttcatgccgttatgacaacaatattctttctcgtaataatgtgcgagaagaaaaaaattattttaaaataatcatcttctaattttatagtgtaattataattatatttttttacttatatttcttataacattaatataaggaatacaaaaatttaaaataaaataataatgataacattaattttataaaaattattattctatcttatatatttattgggttttgtttatctgtatacaactaactataat

SEQ ID NO: 302849 - DNA, 67 bp, Glycine max
  unsure (1)..(67): unsure at all n locations
actcaagcttatcttcttcttcttcttnttttttttttgagttcgcacatagtatgctggcttatac

SEQ ID NO: 302850 - DNA, 390 bp, Glycine max
agcttgtgcctcttctcgtctggaatatgaatgtagcatatagatccaaagacccttatgtgctttgctgatggcttcttcccgttccaagcttcaattggagtcttgtcttttacagacttagttggacatctgttgagtatgtaaacagcagtgtagactgcttcagcccagaatttgttaggtagtcccttctccttgagcatcgatctagctatttccataactgtgcgattctttctctcggacactctattttgttgaggagaatatgagactgtaagttgtcgctcaatgccttcatcctcacaaaatcttttaaactcgcgagaggtgtactttttgccgcgatcacttcttagtacttttatccgttttccactttgattt

SEQ ID NO: 302851 - DNA, 58 bp, Glycine max
tcagggattgggttacgggtttcgtcgatcctgttctctttctgagcttgtgacagcg

SEQ ID NO: 302852 - DNA, 391 bp, Glycine max
  unsure (1)..(391): unsure at all n locations
agcttgtagccattagaagagaatgagcatgtgattggaattatgactgaaaatgttagtcagtttgccagattgattgtgaaggaatgcattaaccgtatcccggtgagagtgtgatccttaaattttgagagaaacgactatcatttagtactgatttttgcgtgaatctctgaagtatggactgaatgcatgaaattgaggatgatgaaggccatgtttgattgtgatagccacttagccaaaaagctgaccatgtgcttgaatgatttaccccttgcacccagtttgagctgaataaattattgattgattgaatctggactctatacagtgttatcttctgctaccttgacttanngtgtangagagcatcatccacagtaagcgt

SEQ ID NO: 302853 - DNA, 58 bp, Glycine max
  unsure (1)..(58): unsure at all n locations
ntcaatatataagtatacatgaattcatatatattatctgagaatacaacacacagtc

SEQ ID NO: 302854 - DNA, 366 bp, Glycine max
agtttaatgatggaatacttacttgttggtgatgaataaaagcgcaaaacggaatcgaagaatgcgaaaagtagagatcctaaggctgcaaactcgtaaattccgtgggtatggcttttgaaaggggggaaaagaagtttttgaatgcaaaaacgtcccccctttcgtcacttttatattttggtgcatgggtggctcgcccaggcgagctaacctgcacttttttttttgagaggaacattaaccatgtcccctccttccttatgggttagtgttttgcctatttgagcctactcaagttagaattaggcgttaattactaaaaacaaacaatggtagtaaaatactgtgaactcataggatact

SEQ ID NO: 302855 - DNA, 395 bp, Glycine max
agtttgtcaacactgttccctttctcccttgcccgaaatcttgggaaacttaagacccttgaaatacagaactgtgacaagttggtagaaattgttggaaaggaagatgtgacggaacatggaacaactgaaatgtttgaattcccttgtttgtggcagttgcttctttataagctgtcactgcttagttgcttttatcctggaaaacaccatctggaatgccccgtattaaaatgcttggatgtgtcctattgtcctaagttgaagctattcacatcagaatttggagatagtcccaaacaagcagttatagaggctccaattagccaactacaacaacaacctctgttctcgattgatatgtgacaaaacattatcagttaaactttttgagc

SEQ ID NO: 302856 - DNA, 385 bp, Glycine max
  unsure (1)..(385): unsure at all n locations
agcttgcatttactgcatttcaagataaaggtggcatgcacctgcatccccaaaaaacatgttcataagtgcatagatttctcttgaggatgagaggccctctcaaagagtcaacctcttgcattctcataaggtcgagccctttggtactagtacctattggcttgttttcataagactcaaagtcctctatcatttacattttcaaagactatcgtagactttcatcatgcggagacaattatggtcattcacacctttttttgccttctagagacaatcaagtccgttggcacgcggagacaaattatggtcatccgctntcttttccttccggagacaataaagttcgttggcacacggagacaaattatggtcatccact

SEQ ID NO: 302857 - DNA, 390 bp, Glycine max
  unsure (1)..(390): unsure at all n locations
agttttcttaagaagattcctaaagaagctagagcttagctacacatacctctctaatagctaagctcacctccttgagatgagaagctagagcttagctacacaccccctataatagctaagctcacccccatgacaaaaaaacatgaaaataacaaaaaaagtccttattacaaagacaactcaaaatgccccgaaatacaaggctaaaaccctatactactagaatggccaaaatacaaggcctagacaaaggaaaaacctattctaatatttacaaagataagcgggctcatacttagcccatgtgctcgatatctaccctaacgctcatgagaacnctanggcctttccttggatctctagcccaatctacttggagtcttctag

SEQ ID NO: 302858 - DNA, 427 bp, Glycine max
  unsure (1)..(427): unsure at all n locations
gcaatcgactcgtacccgngatcttagagcaccttttgcatgcaagcttcacttacacttgattcaaatatcctaacaccctattaatcaatattttctttaaaaaagtgagttaagcacaaccaaatgtatttacctctcgattggatgcatccaatgattatacactggccctcctaatttcacttctttaagaacatgacaagttaaatggaccatcgatatgggtaataggattttcaaatggcaaatagtgagcacagtttgatgttgcagcttgtcaagatctgatacattaaatcttttatcgaacaaactgcgtgagcatgagcaaaattctactgacattacagtcaacgatggatagaaggaggcaaccagcggtcctatttccccctctcacgggatcttattattattaaagtaa

SEQ ID NO: 302859 - DNA, 364 bp, Glycine max
  unsure (1)..(364): unsure at all n locations
agcttctaaactttgtacaagaatgaagctctgataccacttgttagacaagtggcctcagatatcttaagaaggggggggttgaattaagatattcgaaactttttcccctaattaaaaatctatcttactttttacttaagttatgaattcccttaatgacaatcttcttaaatattaattcaaatgaagcaacttgaatatgaatataaagcaataataaataaaggagattaacggaagagaaaatgcacactcagttttatactggctcggtcacacccttgtgcctacgttcagtccccaagcaacccgcttgagagttncactaacttgtcaattccttttacaagttctaaacaca

SEQ ID NO: 302860 - DNA, 385 bp, Glycine max
agctttggagaaccaagccaatcaaaatgctagacgaaatatagatgggaatagaggtaacaatggcggtaatgacggaccgaggcagaaccgggttgagggagtaaagctcaatgttcctcccttcaaaggtagaagtgatccagatgcctacctggactgggaaatgaagactgagcacgtatttgcctgcaatgactacactgatgcgcagaaagtcaagctagcagcagctgaattctccgactatgcccttgtttggtggcataaataccaaagagaaatgttgagagaggaacggcgagaggtatatacatggactgagatgaaaagggtgatgagaacaaggtatgtgcccactagctataacagaaccatgcgacag

SEQ ID NO: 302861 - DNA, 394 bp, Glycine max
  unsure (1)..(394): unsure at all n locations
agcttgaagtgtaagatcttgtgaactttacaagtcaaactcttatcatggcccacccataggattgatataatggtggcagatcttgtgttcaattttttttttgttcgatttatgaagtcaatttcataatataaataaacattttgcagtttaatttacaaaacatattagtttaaacacatttgaaaatagattttcgaaagtgttgaatctacactttggaaacttagtttctagaagtacaagcattgttcaaatacacaattagagtaccttactgaatctncatgctccattatgtatgtattcccctcgtcactaaacctctttggacccantgttctcacatcaagacaccatggcatttgagactcatggaccacccacatgc

SEQ ID NO: 302862 - DNA, 59 bp, Glycine max
tatagcgcactttgaggtgagtacgacttctacactgcaaaatgtatacattctcaaaa

SEQ ID NO: 302863 - DNA, 413 bp, Glycine max
  unsure (1)..(413): unsure at all n locations
agcttgatntgtgagttatttntagccatagtttcactttggttattagtcaattcattcaaggaaacttccaaagaaaaacgtctgattaatttttttgattattctattcaaagatattttaattatattattattattttttcaagatattttgattattttattattattttgcctttttttatttaatcgaggttacaacgtgaacgatcggttggattttattttaacagagattaaacgagattacaacacanatgatcggttgaagttcattttatcatttattaggcgagataacggcttacataaatggtaaaaatatcgttaacagcggaagaaaagaanatcaaaagtgaacgagatgaagatgaaagccaacaaaacaagaaatgaattgaaagtctcgg

SEQ ID NO: 302864 - DNA, 57 bp, Glycine max
tgacatcttttgatatatcatacaatcagtttgagggtccacttccattcattctag

SEQ ID NO: 302865 - DNA, 393 bp, Glycine max
agctttaagaggtcactttttcttctttttttttgaaagaaagagcatttgaattccattcatgggaagaagcccactgccttctttactgatactatgtcctcaaattaattaaaatatttggcgcattagtgaaagataaagacaccaagacttttctgaagcgattatcataaaagttagttatatggaattaaactaattatttttaattcccttcccctatagagaacgatggcaatggccggctatgacaagttgtctactagatgtatgatttagaatgtagtcttaactttagattacttatagctttctggtgtcccacattttttaatcggttatcaagatccattgatctgctactatgttatacattgcatcaaccacaaa

SEQ ID NO: 302866 - DNA, 58 bp, Glycine max
tatttgttagagaggatgaagatgatttcatgtattgttgtttgaaactttgaagttc

SEQ ID NO: 302867 - DNA, 412 bp, Glycine max
agcttgcagtggtagtcagttaggtctttaaggacttctcttgggtctcagcctcgcttaacttagtctttgtgtccttcagagacttctgagaatcctctgccagttgcaacaatgtctcattccccttggcagcctcaaccaaagcttgttcatcctttgcatactcaacaaggtgttcgacctcgtcttggagagctagagtaaagcttgcagtggtagtcagttaggtctttaaggccttctcttgggtctcagcctcgtttaacttagtctttgtgtccttcagagacttctgagaatcctctgccagttgcaacaatgtctcattccccttggcagcctcaaccaaagcttgttcagcctttgcatactcaacaagagctaattgtgactcgatatcagccttatc

SEQ ID NO: 302868 - DNA, 57 bp, Glycine max
  unsure (1)..(57): unsure at all n locations
ntctcttttgtgcaactatctcatcctctttttatggtgtagaatgaagcttgatag

SEQ ID NO: 302869 - DNA, 377 bp, Glycine max
agcttgttaaaaacggaagaaaagaaaactgaaggtgaacgaaatgaagatgaaagccaacaaagcaagaaatgaattgaaagtctcagattcgaaaacttatcggttgaagaccaaagaacgcacgaagaacggcagaaaatcttcacgaaattgctcacggaaacgtctcggaagcatctcggcttggattttcttcacgaaaacgtgttttttcactcaaaatccctgaaatgcatagggtaaaaggtcaggaggctctggaacagcttcccctatttataggagaaaaggggaggaggttgccgcctatctcacccaggcgagcaggtggcttcctctggaagtattttacgaaaaagttcacgccccctttt

SEQ ID NO: 302870 - DNA, 391 bp, Glycine max
  unsure (1)..(391): unsure at all n locations
agttcactcttcgcatctgatgttcacatatgtgtttctggcctccatctttctatcaaggcactaattaatgagacatttatttttaagtattccatcttcataatccagtaaaaaccagattgctgaaggaaaaaaataatttcctctggtatttcttcttgaccttgatacgtggggacagctcgtttaatgtgtagttttatgtcttctttcccattccaaatatgttctgaaacatgtttaccttacatccataaaacgtcaccatcaattagaccaaacttaattnttatatttgatgaacatgatgacgaagatgtcattgatactgcaaaataaaatataatacaataagttaccaacaaactntatacattattntctacaa

SEQ ID NO: 302871 - DNA, 381 bp, Glycine max
agcttgccgccacggagttttccgactatgctcttgtgtggtggaacaagctacaaaaggagagagcaagaaatgaagagccaatggttgatacatggacggagatgaaaaagatcatgaggaagcggtatgtgccggctagttactcaagggacttgaaattcaagctccaaaaactaacccaaggcaacaagggggttgaggagtatttcaaggaaatggatgtgctcatgattcaagcaaatattgaagaagatgaggaggtaactatggcttcgatttcttaatggttgactaatgatatctgtgatattgttgagctgcacgagtttgttgaaatggatgatttgcttcacatagcaatccaagtggagcaacaat

SEQ ID NO: 302872 - DNA, 65 bp, Glycine max
tgacctatgaaactcagctttgaaatatccctttctcgtcactaaacaactattggatcacttat

SEQ ID NO: 302873 - DNA, 388 bp, Glycine max
agtcttttgctgcaaaattgcttccttggttggtgttttggttcgtgctaaaggtggtgtttagcattggttgtgtggttggtgggttttgtggttgatttagggatgacctttgtggataactgggtggtgggtaaggagaatggttgttattggctgagtaatgacattgttgggttggtgagaaacttggccgtataggaatggtagtcacagcatgggtttctccttcattctcaccctcttcatttgccccaactttctcacttatcaaagtaggatgatcaaatttgcctcttttcagacccgctttgatccttttgccgatgaagaccaaatcccgaaagcttgaatgtgcataccccaccatattttaatagtaaaacac

SEQ ID NO: 302874 - DNA, 397 bp, Glycine max
agcttcaatggagcttacatcattgtccttggatgtattagttttacttttatcagatgttcacacatgtgcgcagaaggaagctggttaggaaccaaattggaattatatatgcgcagctgaggcgatgccaattttcaagtgtacaggtctctaatttttgtgtgggcttggtgctgataaacaagtaagttgaagggtgattatatgaacgcttggtggtgggttactacttactagtgcctcttattttcttcataaggcttaaggggttaggcgatttttgtttatatcggcctatagaatatatgtattcttgcttacatttatgagtatgatggattaatttactttctatagtgagttggagatcacttatttagaagatcactcttat

SEQ ID NO: 302875 - DNA, 327 bp, Glycine max
  unsure (1)..(327): unsure at all n locations
agcttaatatgggtcaatactnccattattgacgtgcatcttgaggaccttccttcaacctcttcttcttcctccttctccttgatcttctacataccacatagctctactcatatgcctatgaagctgctcatacaagcttttcagatctatgtgacacgctctcacatacccaccactctcactcttcttcatctctctatctctctctctatcacacacacacgcacacacagcacttttctnttaaaaattcacaaaattcaccacacacccctatggactttgaagctcatacgcacttgcaatatcaaaacatgcaactct

SEQ ID NO: 302876 - DNA, 353 bp, Glycine max
ttgtgtggatcggccaccacccgtctggacgatagaacgacacatcaattgcatttccttttccatgtcttctgttggacaatggtttggaaaagcatccgactaagcacacattggaccttatatgacccttccccttatttctctgcatcactgtgacccagaaatattggggaaaacgaaatcatctattaaaacatgatcatatttattaaatcttgtcgacatcatagtcttcattccaataagactattctgtgactctccatgttaatctcttttgcgactcatacggtttggtgatcctatcatttgacgcgtatccactatcatcgtgtgtatcgataccaacc

SEQ ID NO: 302877 - DNA, 385 bp, Glycine max
  unsure (1)..(385): unsure at all n locations
agcttctatcatcgattcatctaacagtacatgcaccttgttgtgccactcataaatttattgaaagcaaacaagatagagtggtctcgaagggccaatacagctctacagagttaaaaaatgttatagtcaccacccctatgttgcaactccctaacttctccttacagtttgatccaaagaccaatgcttcatcctctaccatcaagcctattctctcttagcaaggtcacctagtggcatattttagtataaaaaaaactctgcacaaaaatgcaatccgcatcagcttgtgcaagggaaatattggcaattaccgagtcagtgaagaagtggtgacactatcttattggcagcaaattccgcatntctatataccaacata

SEQ ID NO: 302878 - DNA, 53 bp, Glycine max
  unsure (1)..(53): unsure at all n locations
agcccaacgaaggaaaaagaacaaaaacaaannaaaaaagtgactgaccccga

SEQ ID NO: 302879 - DNA, 94 bp, Glycine max
ggcgaatcgactcgcacccgggatcctcacagccgacctgctgcatgcaagcatttgcttgctacacccccctcccacacaacaaagtcacaca

SEQ ID NO: 302880 - DNA, 406 bp, Glycine max
  unsure (1)..(406): unsure at all n locations
ntgtccccacttccttctcgctgaactatgctcaactttagcaaccattgaacgtctagactaaaacacactaagctcagccctcagatccctcccgatggattaggctcagcttacacaacctccgtacgcatagactacattaacctacacctcactccacagatccctcattcaccactaggcctaaatcacaccacatcttcatcacctcacatgaagaacactaacactcaatccgcagatccctaatccaagactaagtctcactcccgcttctatcacgtcctcaggcaacaataccatcttccacgcctcaagtcacctacctatacacacaaaccgggcgatcagaccaagagcctgtctaaattacccactgaacatacatacacacattcaatca

SEQ ID NO: 302881 - DNA, 530 bp, Glycine max
  unsure (1)..(530): unsure at all n locations
gtaccgcaaacgattccgtgccaggaaataagaaattanagacaccgtcaaaaanaaacagagagtgaaccntgtgacacctcgaanacatcggcgaancganctcgcacccgggatcctcagaccgacccgttgtatgcaatctctggaaccgacgccgatacacaagcgagacgcatgaagcgaccaacagtgagcagccgcaactaaggctcatctaacaacacaacatggcgtcggaagcgtcacaccccaaaccaccccgaggaccaccgctcgacggcacgaaaccaccagcttgaccgctctgacgaactcgacacccatcgataaacaacccgcgaagctccgcgacgcggtggcgagcgaacgaaaacactatcgggcaatccgcaacgcgcacaacacctccgacgccgaagaggggacggccgcgcaataccgacagctccctgacacaacacacccaaaacacgcaccgcacgcagcctctaggccgcacaccgcacccaaacaaaacaccaacaacg

SEQ ID NO: 302882 - DNA, 404 bp, Glycine max
agcttaaataaacattatttgaattgaaagtctcggattcgaaaacttacccgttgaaggatgaagaacgacgaagaacgatgaagaatttccacagaatcgcttacggaagcgttacagaagcacttcgactcgatttttcttcacgaaaacgtgttttttgcccaaaatagccgaaaagcatagaccatggggtcttgaacattttgaaacagctccaccctcccctatttatagaaaaaaaggaggtgcttgccgcccaaagacttaatgaagaagatttctaagcgcacccgaattactaagttcacccgccttttcgaattttacagaaaagttacggaagccttacggaagtgttttcgaatatgactttcatcttttttgtcttccgtttcaccaat

SEQ ID NO: 302883 - DNA, 430 bp, Glycine max
  unsure (1)..(430): unsure at all n locations
attgttttcaattatgagcatctcgatatattacgggactcaatcgtgtcatccgagtaaaaagttattgtcgtttgatttttctcagagcttcagttttcaatttcgagcgtctcgatatactacgggacacaatcggacatccgagtcaaacgttattgtcgtttgaatttgcttagagcttttgttttcaattacgagcgtctcgatatattatggggctcaatcggacattcgagtaaaaagctattgtcgtttgatttttctcagagcttcaattttcaatttcgagcgtctcgatatactatgggacacaatcggacattcgagtcacaagttattggcgtttgaatttgctcacagcttctgttntcaattacgagcgtctcacatattacgggactcaatcggacatccgagctaaagttat

SEQ ID NO: 302884 - DNA, 388 bp, Glycine max
agctttgcagcctattccttccttgaagtagctatggtcttttctggtgtcctcttgatctccctatttgaaacttcaacttgtccatttgtttgcggatgatagagtgatgctaatatgtgttgaacatcatattgttggaggacgtttgaaagttgatcattacaaaagtgtgtacctccatcactaatcaatagtctaggcactccaaatctagaaaagatgtttctctttaagaacttaatcattgtctttgcatcattgattggactagcaattgcttccacccactctgagacatagtgcaccactaccaagatatattcattgccaagggaggatggtaagggaccaacaaaatcaattccccaacaataaaagacttcta

SEQ ID NO: 302885 - DNA, 441 bp, Glycine max
  unsure (1)..(441): unsure at all n locations
nttccctttntaaagacaccccaagcaaccctccatattaaacaatcattttcaaggaattttcagcttccaaatgtccatctagtttccacttacatgtagaagagtgctattaaccatattccccatagcatgatagtaagtcgatttttttgagaaagtgccatccttggtgaacttccatagaattttatcaggattgtgtgagaggtaaatgggcatggaaaatttttttgcagcatcaataggggcaaatagattatgaataagagtctcattccatgtggccgatgtatggtgaataagggaatttactgttaaattcgagagtccatcaataggaggagaaacaatatatgaattttgtggatcatgaagccaaggattagtccaaatttttatcttgtgtccatctctcaatctccttctaatgtcatcttt

SEQ ID NO: 302886 - DNA, 321 bp, Glycine max
agctttggagcttccatgtgccaatttttcttcttctttagtccagtcttcttctggcttcaattcatcagtgggctctccttctgtgtgcagcatctagggatgttcccagcctttgatgacagctttccaggttctgctatccagtgatttgacgacagccaccatccttgctgtccagtatccatagttggttccatctacgattggtggtctgttgactgtgcctccttctatctccatgtgcatcagaatttatttccctatatctcactctgtgatctcgaatgttggctcttgatccaatcgagattctgatcc

SEQ ID NO: 302887 - DNA, 370 bp, Glycine max
taatgtaaccttttgtagctttgaaaactctacggctgagcctaggctttagagtttccttttgttaaggcattatgtcttttgttcttgaagttttaatataaagatctttcttcatctgttcctgcgcctctacccattctcattaatttgcatgtttatttctttacgcttaaaatgccagatccgacgatgagtccctcgaaggtactaatacccaggacttggccgtcaattttgagcaagaagcgggtcggatggagagtgaagaggacgacgatgtggggcttcatccacagctggagacgataatcgcttatgaggaccgagagatgacgcctcatcaagatgagacggagctcatatactt

SEQ ID NO: 302888 - DNA, 334 bp, Glycine max
tttttatgcaagcttttcagcacgcttccatcaagtgttaattaaagcacacggccttcaagtacgtgctccttaaacctccattaattttcagctttaccttctactccattgttgtttcttcatttttctccatgtatctccttacatttcttgtgctgaatttggttagcatgattttttagaatttcaaccgattaaacttgttatataagcaagatttgattttctatggttcaaattccttgttcttgttcttgaaccatgaattgtgttaagtttaagttcctttgagttttgcattgcaattcttttttttgagaccacaaccatt

SEQ ID NO: 302889 - DNA, 377 bp, Glycine max
  unsure (1)..(377): unsure at all n locations
ctattataatcatgcattcaatccacaattaccattttttaactatactaaaactgcattttcaaggagtcaagctaaactgttctatctgtatcacgactttcaaaatctttccaaaacaaaaagtatactgtaaaccatattaacataccacacaaccataatangtcatatgtactaaaaatcgtacaaccaatagaccacacaaacataataattaaaatgtactaagaacaagataattataataataataataataggaggacaggtaatcagatcttgtcattcatcccaatcttgctcctcattatccanatgtagcactggagtcctcgaacgagtagtaatctgtccctcctcctcatctgaaaaat

SEQ ID NO: 302890 - DNA, 394 bp, Glycine max
agcttgtcagggtgaggaggtgaatagcactaaggaaatgcatctattcatcaatgtaggtcattcaaatgaaaggtctgtgggtagaacggattgaggtcgaggctgctcccacgtatgatatctaaaatggactagcataacatattcctgtgtcagagctacttatgtaaaggattattttacaaaactcaaatggtaaaaacaacattcagggggcaaatagacaaagctgatacaactggtatccacaaatagaagaattcacacatcagtacacagagacgcatagagagaataacgaaccagctattatctattgattactgaaaatagtgtctcagcactctcctctactatgagttttccctcaaatacctctgcatatctactg

SEQ ID NO: 302891 - DNA, 411 bp, Glycine max
tgcccttctgatccgaagaggctgacccttgcggagtccgtcgagagcgaaattgacctcgtcaacgtgctccatcatctctccgaactcctgcgcctccatcagcgtcgacgtcgccggaatcccctccgccggcgcccgctatgccctcttcgactcccttgctccgcctgcgccggtgccgtttccgaagtcgccgatctccgaatcgaaaaaggaccaacgctgcgaggacgagtcctgtgaggagaacgcgaagccgcagagagggtcgtctatctcctgagataaggaatccctgaatggctccgcaacgtcgtcgtttagagaggacgagcccgaatacgttcccgaaagggtttctctgcggcggtcgcacgtgcggacgatcatcttatacggggatcggcg

SEQ ID NO: 302892 - DNA, 381 bp, Glycine max
tgtctgcaacctcataaaggtgcttggcgcattagctgagcctaaaaagcatcactagccattcatacaaatcaaacttagtcttgaaagcggttttccactcatcagcctttttcatcctgaattggtgatacccacttttaagatcaatttttgaaaagatattgtcaccatgcaactcatcaagcaaatcatcaagtataggaatggggtgcctatactctacagcgatgctgctgatggccctgcaatttgtacacattctccacgtaccatcctttttgggcaccaacaacactggcccaacacatgggcttatgctcttttgacccagcccttcttaacaatcttttacctgaaatctatctcctatctcctgag

SEQ ID NO: 302893 - DNA, 386 bp, Glycine max
cttaatggagaatgaagaagaagaacatttcaacgtgttgtggagagagagctgtctgaaaagtgtgggggctgagtgaagagagagaaaagctcttcggtttttaaattaaagggttttctctttttctattattttattcaagctctgccacatgtccctatttgagtggagcaaaagggcccactttccttttttactgtgacccacactcagccacaaaagtgagaaaaatctgacctttgaaatgctaaaatcctgcctcggttcgcgtgtcgattctctggttctagtttctcgcatttctctgcgtccgtcggggccggttctctaaagtaaccaatatatatatcataacgctcacaatagaaccacgagcgtggttc

SEQ ID NO: 302894 - DNA, 388 bp, Glycine max
  unsure (1)..(388): unsure at all n locations
agcttgaaggcatgtaacccaccatcttttgatagtacaacaccggtaatgtcgttgctatcattgttatcatttccctctccatcattgagggcactacttgagctaccagatccctatacctttgggcatattctttgaaagatctatgctcgtttttacacatgttttctagctgtattctatccggagccatattagaattgtactgatactgcctaatgaaggcaaccattangttcttccaagaatggactccggaaagtttcagattcgtatacctggtgacagctgccccaataagactttcctagaagagatgcattaatttatcattcttcaagtatgcgcccatttctctgctgtacatcttcacgtgaatcttggg

SEQ ID NO: 302895 - DNA, 239 bp, Glycine max
cggacctactgtgaatagcccaaaagcaccttctattttctgaagtggtgaacccgatgtttggatgctctcaatgacatctaactgtcgctaatgaacgactttgactaactatgcccaattatatatgagtaatacctataagctctatacatatgacatgcatatatatatatatatatacataacagaccctcaaaccacctataaatatatacattgatttactgacatggctc

SEQ ID NO: 302896 - DNA, 391 bp, Glycine max
agcttctgctccaaataatcataacccccacgagacaaaacgtgggggacagtattctgcttctggatggcctgtgccttcttgcgcacatcttgaaaaaattaaacaataatgtttgaaatgggtagaatgaagtataacaacatcatgtttaatatgaaaaacaacttaaatggcaaggaacatacctcctaagaagggtctctacgagtctggcaaaaatgggctcacttttccttgctgatgccgtatttctcatagacattgtcctcgacactgtcctgatcggctgcaagggcccatttcctcgtgaggtctgatttaaaccttcttcatctctcacccacgatctgcagaaacttcttttcatcctactatcaaaagcctctaa

SEQ ID NO: 302897 - DNA, 432 bp, Glycine max
  unsure (1)..(432): unsure at all n locations
ttggtcaatctaaggagtggtgtcttcatgctgcatattgatggtttctgagtggaaaattctaatttggttaagcatgaaattctgcagcatttgcaaagcagattcaaattaattgaagttatgtacgagcactgtagcttttacaaaaataagcactgcagcttatttaaggcacaaattctgcagcatctgcaatatgtgggtgtgtttcaatgtgtgtgtgtgtgtttctgtgtgcgtgtgtgtgtatgtgtgtgtatctctgtgtgcgtgcgcgtgcgtgtatgtgtgcgtgttccaatgcgcctgcgtgtgcgcgtctccgtgngtgtgtgggtgagaggctgcacaatgtgcgtgcgtgtcgcgctccgagagcatgtatgccagtctgtctaatcccacgtgcgcgctctgcgcgagcgcccg

SEQ ID NO: 302898 - DNA, 343 bp, Glycine max
tttatgcaagtttttactatgccttgatttacatcaagtgatttgatacgtatattagcatggctagacaatattgccactgaaattcataccttaaactatcgtaccatctatattaatgtgaatttgtaacttgtcagtccaataacatagaacatatatctacacttctaccatgctcagtggaacactacaatgttgacatgattataatattaataatgttaaatctctgcatagcgatggctgcttatggcggtaagccacaattctgtcatatccatcatggacatggagtggcagactatatatatatacacacacttctactgacaaattatta

SEQ ID NO: 302899 - DNA, 250 bp, Glycine max
ttaagggtttgctgcattctgagtgtgtctctaagttgactgaccacgcactgtctatttgctcagttgttgctcacttctctgcagcactcatggttatgcttaaacgctcttatctgaacagagatcctcacttcattctttgtacagtagattttccaatcacaaaatgccttattgccttttgctctacccctgtgtttatcattcttctctcacctgaactccctgcccatcaatatgctatact

SEQ ID NO: 302900 - DNA, 358 bp, Glycine max
  unsure (1)..(358): unsure at all n locations
taacctctgaatccaagaaagcactctgatttctgacgttcttggcgataaaaatggtcattgaccaatccctattctatgacttgacccaattatctactgaaggtgcaccatttgacggtgcactaaatgatgattggagattcgatctctctgcgcatgatgcccgccaattggttttgcaccaacctcacgaatatcaccggacggctgcttgtcggatcattggcttttgaaaaccgcatccttccctatcttattggctgtattctacttccaagatcttcacacctagcacaggtttntgaagaagatcttatagttatgtgggctttccataatggtcgacaaactgatt

SEQ ID NO: 302901 - DNA, 424 bp, Glycine max
  unsure (1)..(424): unsure at all n locations
tgtcaaagccttgtatggattgaaacaagctccaggttcttggtatgaaagactatgctcattcttagttcagaatggcttctccagaggaataatggacaccacattatttagaaaggctcagaaggaaaatctacttattgtacaaatctatgtagatgacataatctttggttcaaccttagaaaggacgtgcaagaagttttttgagctaacgaaaggtgaatttgaaatgagtatgatgggtgagctgaagttcttcctagggcttcaagttattcataaagatgatggaatattcatccatcaagagaaatacacaaaggatctacttanaggttcaagatggatgaaaccaaacctatggctgcccctatgcatccaactattgtcagtgacaaaggtgagaaacacaatgatactc

SEQ ID NO: 302902 - DNA, 412 bp, Glycine max
agcttgtaggattatggggtacccatcacatgtggtactaggtggcggtcgggcgatggtgcacaacaagttttccacatccacaacgcgcgcataaacccaccatcccctgttgcccacctccaactgagctcacgtactcccacgtagcccatatcctcgtttctctcaacaccgggtccccatcaatcctctcaagcttccccaacatccaagtacaacaacattcaaacagcacaaactatcacagccaagaaaagcagagcaaaggcagaaaactctgccaaaacaccaaccaaaatcacagcttttctcacttaaagaccccaataacaattccttcgatccaatttgttgaccgttggatcgactccaaaattttactggaagtctctagtacataagcctacat

SEQ ID NO: 302903 - DNA, 434 bp, Glycine max
  unsure (1)..(434): unsure at all n locations
ntaacctaatcgtctctcacagtctttagatttgggagccaatccagtccttgtgttcggactcttagccacttatgatagccgccgatgatcccattactgcttcccctaagctctctgttctttcttcacgccacatcccatgccttgcgaactccttggagtaccctcgcgttgtggtcactgaaacctcgtgcgatgaaaggcgtgatgctttcgtctgatggcactcctctcatgggacatccttcgcatgaagatagaatcctgattcttccttccttctagcgagggaaccatttaacagacgcccctccatgctagccaagagttggtgcacaacaaacaattcttgcgccgctcttttcacatccccggtcgaacgtgtcatacatggccaaaatggcgacgaccgggctttccttgccatgatg

SEQ ID NO: 302904 - DNA, 402 bp, Glycine max
  unsure (1)..(402): unsure at all n locations
agctttgaatgctctattcaatggagttgacaagaatatcttcagactgatcaacacatgcacagtggccaatgatgcatgggagatcctgaaaaccactcatgaaggaacctccaaagtgaagatgtccagattgcaactattggccacaaaattcgaaaatctgaagatgaacgacgaagaatgtattcatgacttccacatgaacattcttgaaattgccaatgcttgcactgccttgggagagaggatgacagatgaaaagctggtgagaaagatcctcagatccttgcctaagagatttgacatgaaagtcactgcaatagaggaggcncaagacatttgcaacttgagagtggatgaactcattggttcccttatacctttgactatgactctcgg

SEQ ID NO: 302905 - DNA, 432 bp, Glycine max
tggtgcttggtttgtgagaggtagatctctcttagactatttctcttggcttttctatctttactctttctttttcccttttaatattctcccttttttatatgtggtagagtttcttaagggttacaagtgggtggtccatttttccattttaagcatgtagaactgtggaaaaaaggtaaggggagtttttacaaatccttggggtctatgtgtgtttgcaatgcatagagctttaatttttatgttgtggaatgttgtgtatttttttcgtatttgccttcgccaatgcatctaggacttctttgtttgttattatctgtcttggatgccaaacttgggttccttgaacccaaaatcctaggaaagcatataaagtttggtgaatttgggtttgtgtagcaaaagttatgtaaaaatcaagttttgaac

SEQ ID NO: 302906 - DNA, 395 bp, Glycine max
agcttcaagaaaaagttggccttagcaaactgcttatttctagaagggaattctatcaatagacctccaatctttaatggagagggttaccattactggaaaacccgaatgcaaatttttattgaggcaatagacctaaatatttgggaagccatagaaataaggccttgtatacccaccacagcagaaagaattacaatagatggtagttcatcaagtgaaagtataactatagataaacctatagatagatggtctgatgaggatagaaaatgagtacaatacaatttaaaagccaaaaacataataacatctgccctgtgaatggatgaatatctcaaggcttcaaattgaagactgctaacgaaatgtgggacacttcttgattaacacat

SEQ ID NO: 302907 - DNA, 452 bp, Glycine max
tactcaagcttatactacattgtaagagaatgacgagtagaagagatacttaacagattgtaaaagcagaaattaaatgcacaacggatagtaaaagagtagggaagaaggaaacaagcacacaagagtttttatactggttcggcaacaacccgtgcctacatccagtccccaagcgacctgcggtccttgagatttctttcaaccttgtaaaaatccttttaaaagcaaagatccacaagggatgtaccctcccttgttctctttgaacctagtgaatgtaccctccactagaactgatccacaagagatgtactctctcttgttctcagtcaaacccaagtagatgtaccctccaatgtgtcaagacaaagatctcatgcggttaaaccttccatactctgtgaatggcgatataaaagaactctcacgcggttagtcctttgaacact

SEQ ID NO: 302908 - DNA, 400 bp, Glycine max
agcttcttcctctggtgacgaaacacgtggcggtgccagtggttttgccggaggtgtttcacattgaccacccacactaccgccaccgccacggccactgaaacatggtcccctacggcagcgtcatctggcacagcggtgctgctaacgcgttcggcccctgcgccactactagatattcacttgcctctctcccacgaccactgtatacgccgtcgtcacccccaccacctgcgaaaccacctcccccaccaggagcacggtcggcgcgggtttgcaccttgtggacagtgatgttcggccgccaaggtcttggttgtgcaaatcgcttttcacaactatcactccctcttgaagcatcagttagagctgctggtgtttccatgagccacaaccaagc

SEQ ID NO: 302909 - DNA, 309 bp, Glycine max
  unsure (1)..(309): unsure at all n locations
cgttcctgaaaatgctattacgctgagcctgttttcattctctttatctatggaggccaagagatggttgcattcattcaagggcaacagtctacagacctgggatgaggttgctgagaagtttctaaaaaattatttcccagagcctaaaattacaatgggaaaagttgtaattccttcgttccatcagtttcccaatgaatctttgagtggggcattagaaacatttcntaacttgttgaggaaaacttccactcatggttttatacagcctatacacccgaacatnttcactgatgggttacagcc

SEQ ID NO: 302910 - DNA, 186 bp, Glycine max
agtctcgttcatcattttcgtacatgtgtatgaatgctcgttgatcgaggccgtacccgaatcaaataaacatgaaaatgcagtaactaggaagtgatcctaggtcgtttcccaacgagcagtgacaaaccaaatggtcataatatacttgcagtaacagtaacgattggggggggggcttcgtat

SEQ ID NO: 302911 - DNA, 324 bp, Glycine max
ctaagcttcatataagctgaaccattttatcattaaacacccgttcgagttttattcagaacatttgagttgatctctttcatcttagtgagagtgattctcctacgttcttgagtgattcaagaacaccctggctatattagacgactttcacaacctttgtgtgttgccttcgccggaaagattgattatttccttcttttgatctctaaccttgttctttcaaaccataattcctgacaattcacttctgcccacaatcatctcatggccatcactctcgttttacacgcctcaattaagtgatttttgagcctaaattga

SEQ ID NO: 302912 - DNA, 321 bp, Glycine max
agcttattcagaatgataacacggtaaatttaaagaacaataagtagcaattacttacaatttatgcactatgtcacaaccaattttgcttcatgcagacgatcttcagttatcacattactcctgttgtcgtcattcttctctttgtcaaatgcatactccagttgtctctccactgacttgacaattgctgttcgcttggatcttaacctgtatgggggagatgcattgaatgccttattgttgggaatgtcaatcccattgccatggcttgctggactcctggagaaatgcccagaaccagaatcatcatcggttctc

SEQ ID NO: 302913 - DNA, 434 bp, Glycine max
  unsure (1)..(434): unsure at all n locations
acagcttggctgttcggaatactaatgtcatatatgctagggttattgatagtacgtacgcatagccacccacgttggggaatttatgcagattatgtgctggttcatttgaatatcgagataatactggataaatctgaaatcgtgtataacactctcagattgaatcaaatttcggggttcaaccaaaattgctcaatcgaataaaatcagaagattataattcaagagttttgtttcggtcttgtatgttttgtcacccataatgctttctgaaccaaaatgattattcatgatcaaagaacaggcggctnttggcggctgatgaacacgtgcgttttggcggctgatggaagttctatctttcttaaaacctgcctctttctgaaagtcacttcnatgtaatttccagaatttgcctacaccgaacatct

SEQ ID NO: 302914 - DNA, 348 bp, Glycine max
agcttcttggaggtttgatggatcctcctctaatgtataagccatataatcggacccataatctttagcaattcttgctctcttacctcttcgaggctctatatctggttctggttgtgcaagattttctactaatagtaggaagataattggatgaagtacccccactattccttaatttaaaaggaaatctattttcataaaaatcagcatcatttgactctatgatcacttttgcgtttacgtcataaaacctatacgctttgctattaatagcataaccaatgaacacacattcataggctctacttgcaagtttaaccctcttatgatctgcgatccttacat

SEQ ID NO: 302915 - DNA, 428 bp, Glycine max
  unsure (1)..(428): unsure at all n locations
tgaaggtgtgtagcccatcatcttttcatagtagaattctggtaatgtgtctactatcattatcatcatttttttctccgtcattgaggtgccacttgagctgccaggtctctccacctttaggcgtattcttttgaaagattcgtgccccctttttgcacatgttctgtagttgcatcctatccgaagacattatactgacactgcctaacgaaggcaaccattangtcctcccangaatggactcgggaaggttccaagttagtgtaccaggtaacaactaccccagtaagactttcttggaaggaatgtactaacaattcctcatcttttgcgtatgcccncatcttccgacaatacgtctttagatggttcttggggcaagtaatccccttgtacttgtcaaagtccagtaccttgaacttgag

SEQ ID NO: 302916 - DNA, 329 bp, Glycine max
agcttgtatgattatggggtacccatcacatgtggtactaggtggcggtcgggcgatggtgcacaacaagttttccacatccacaatgcgcgcataaacccaccataccctgttgcccacctacaactgagctcacgtactcccacgtagcccatatcctcgtttctctcaacaccgggtccccatcaatactgtcaagcttccacaacatccaagcaaaacaacattcaaacagcataagctatcacagccaaacaaaagcagagcataggcagaaaactctgctcaaacaccaaccaaaatcacagcttttctcacttatagaccac

SEQ ID NO: 302917 - DNA, 431 bp, Glycine max
ccgcttgtatagttccccaatttgtagtcattttggagtaaattttgtaaataaatcttgtttatggctaacactgtctctagaacaattgcatcggacttaatgatgaaatctgtgcattttcaggtgaaaaagacgctaagttttgaattgcaaaaagcagcagttgggctaagcgcatatccatcgctaagtgcagcttcagcacacttagcgcaaaggagaatctggcagagcatcaacatcaaatttgtgcgctaagcacaacaagtgccttcagccacgctaagcaccagactggcgctaagcccaatttcacttatctgtgctaagcgcacaggcggcgctaatcacatcatcgcgatttcgggcctattaaagcttgtcttggcataatacggtacactttacaacactctaggacttgaaga

SEQ ID NO: 302918 - DNA, 317 bp, Glycine max
  unsure (1)..(317): unsure at all n locations
ttgctgcaagcttgtgntttggctaagaaagactctaagatttgggatatcttcttgaatagttcgactattctgaacttatcctcacttttttgctctttttctttgtagtggactccttcaaatgaaggtccttatatggaccttggagctagccatttaccactgttgcaggcattttaaaacacatttaaaactgcatgagttgcctcattcatacaacaaatgaatgatagtgtaataatagctgacattcttatttaccacataatcgacgcccattgactgattatgactcacatcttaatattattata

SEQ ID NO: 302919 - DNA, 377 bp, Glycine max
tgggttaagttgagttggttcatcatattgagaccattatgttcattaatatcattaatttgtataaatgttgttacaatctacatgtgtatatcatgctgcttatgaaatttagtttattacaaaaacttcttgctcttaattttgatatgtatggcgtgacaccctttaccccgacatatacataaataaataaaatatgtaaatatattggtaaacaaatccacgtgggtaaaagattcacattcacttcactattatcaaatataatttgtataaatgttgtttcaatctacatgtgtatatcatgttgcttatgcaatttactttattacaaaaatttcttgcttttaattttgataatggatggtatacat

SEQ ID NO: 302920 - DNA, 386 bp, Glycine max
  unsure (1)..(386): unsure at all n locations
agcttctaatgatatgcacggcttatactttaatgatttggaacgatgcattagcgttaattaaatatagtcaacaacaatagtttcaaccgcagatacgtattcaacaattgaggtcaccctaaaaatgatatacaataatcattaatctcctggcctcttcatatccttcccgtttatgtggacttcttatttactaagtggttatttcttaaaagtatttatcaaagcggtagagttttaaaattatttatctactagaggtaatttttgtcatataaaatgtagaaggcatgatcgtgagtgacgtcttgtgtttttcgtttgtccactaataggatgcaccattntatttgacttcttcttttcacgtattcagtcagtat

SEQ ID NO: 302921 - DNA, 413 bp, Glycine max
  unsure (1)..(413): unsure at all n locations
tnttgggcgcgcatgcgttttagtagctaggttttgtattttattcaatgaaccaagatggtcatcgatgagaccatcgttgtcgtcattccatgttattacaaaattgccactaggtggcattctaagacggtcataaggaatcgccttagattctgtgacgtaaaaaaaattctgttaattacaaaaatgccatcgtgtggcattctaaggcggttctacagaaccgtcttaaattcactgtcgtaaaaaattaattttctagtagtggtaattgcatctttcgttaaagatcacaaacaagcaaccagaattatattaaaaccaacatactgataaagtggcattgcacganacactaatacttcattgtgaaataaaaataagaacatanaatgcgtggaatataataa

SEQ ID NO: 302922 - DNA, 375 bp, Glycine max
  unsure (1)..(375): unsure at all n locations
agctttgtcaaagttagcatggatggagcaccttacctccgcaaagttgacttgaagatgtacaagagttaccctgagctctctgatgccttgggcaaaatgtttagctccttcaccattggtaactataattaatccataatttaccatacattaacttttttttatatagaatttaatgactgatcataacttttacgtatcagtatctagtttgttttctctttaatataactaccaaaagatatggatcttanatttgattctgtagaaagttaactaatggtgtatgtgaatataaaattgaatcgtgcagctgattcgatggtattaattattggtgtgttcttgatatatttaaggaaattgtgaatc

SEQ ID NO: 302923 - DNA, 425 bp, Glycine max
tacatatactgacactacaatggaaataatatgcacttcctaacaactatacataacattttgttcatgtattaatgagacaaccaccaggacattgcttgctcatataatgaggccgacaagacaaatatggatgcataattgctacatttcaagctttttgagttgtaaactgattcactttggccttgggatttggggaataatatcagaatgacttgttggaatttcgatactagatatatcatatcattgctcagaaattaatatatgatgtttattctgatgatgatgtttatcaagcctaattagtttctgatgtggttcacaattaactaagaagtagcatgtagattaaaacaaaaacgaaaacacatacagattcctgttataaagcaattcagtgatacaaaacacataattaa

SEQ ID NO: 302924 - DNA, 390 bp, Glycine max
agcttatcacccttaccggctattaaaaaatcttttaagggaagttaagagcatgatagtgtgctgataccattaactagtcaacaggttcttgagcgggttgagggcatcaatactatatttggaaagacccaaaagaagaaaaaaaaaagtaaaacttccatatggaagatgaggctgatattgtttgatcttccatactggttcgatctagatgtcatacattgtattgatgttatgcatgttgagaaaagtgtgtgtgatagtgtcatcgacaatcttcttaacattcaaggcaagacaaaggatggtttgaatacttgccaagatctagttgagatgggtatacgagaccagttacatccaaggtttgatggtaagaaaatatac

SEQ ID NO: 302925 - DNA, 440 bp, Glycine max
  unsure (1)..(440): unsure at all n locations
ntgagaattgcccaaactccctctccctttctaatttcaagcttaaataggtgaccttgttggtgcttgcacgcttagcgcaactccgactcacttagcgtgcataagtgaatttcggcttggcgctcgtcttctcgcttagcggatccatacaagtggtgtgcttagcgagatgagcccttgcttagcatgtgtgtctagctcatcctcattccagattcttcctcgcgctcagccgcaagagtggtgcgctcagcggatggctcgctagcgagaagttgaaaataaacacttcataaacttgcctaattaacctgaaattgaaaggaaatgattattaaatacataaaaatggagtactaagtacttattacctatatttaacananagtaattacaacactacaaaataaccataaatgggaggagttagatacaat

SEQ ID NO: 302926 - DNA, 401 bp, Glycine max
  unsure (1)..(401): unsure at all n locations
agctttataagcacatgtctgggagacaaagatcaagtggtcacgatatacgaagatgatgttccgagtacattggatttggtacgaccatgccctcctgatttccagctgggaaattggcgagtggaggaacgccccggcatttacgcaacgagcataatgtaaacatttacggttntaaaagctctatagttgggcctatgctttagagtttttcttttgttgaggctttgtgtcttttgtttttgaatttataatacaaggatctttcttcatctgttcctacgtctctacccattctcatccatttgcatgtttacttanttatttctgaaacggcagatccgatgacgagtcccccgaaggtactaatacctgtgacccgtctatcaacttcgagc

SEQ ID NO: 302927 - DNA, 394 bp, Glycine max
tccatcacattctaaatgtagtttggagaatgaacgatctgctttcttgtaacataaacgtttaggtcacatttctagagaaatgatggaaagattaataaagaatgaaattcttcctgatctacattttacggatctaactatttgtatggattgtattaagggaacacaaacaaaacatacaaagaaaggagctaccagaaacactcggcttcttgaaattgcgcatactgatatttgtgaatcatttgatgttaattccttcatacaagaaaaatactttatcacctttattgatcactattcacgtcacggttatgcctacttactgcatgagaactctcaagcagcggatgccttataaatttacttgaatgaagtacaaagacaatta

SEQ ID NO: 302928 - DNA, 321 bp, Glycine max
agctatttctagactcatcttctctttgaagtgacatctcctctctcccttccttctccattccgctgccactcatcttccaagaagtaaaggaattcattgatgaagaaaatcctagacctacaagctccaatggagcctacatcaccatggtacgagaagaaactctacttctttttcttttgggtctatgttcttctactgcggagattgattgacgaaatgggtcgcgtagaaattatgaatgacgatgggaaatcatggctattctcgcttgtatctcaaagatgagaggatgcaatcactaaacaacaaatgatg

SEQ ID NO: 302929 - DNA, 411 bp, Glycine max
tactcaagctggtgcttctgctacgaagtggagctggaggaggaatatattttagattttcttccttagctcatgattgcctgcggttcttgtgccatggtcctaggtaacgaaccttcctttgttgctattattattagggaccactttagatttaaactctgttgttcggtctgatttcatttgacattctgtttcccccgatctttattctgttatcacttaattctgagcacttttctaatttataactaaatttaacaatcgacaaatgagtggcacgcgatataaaactccctttctcctatctttttttctcaaaataaataaatcctcgattaccgcattctattcataagatactttcagttaaatttggatcaaagcaccctcgtatatgattagaatatg

SEQ ID NO: 302930 - DNA, 385 bp, Glycine max
  unsure (1)..(385): unsure at all n locations
agcttggagctggttcacgctggcgtcgtacaactggtcaggaaatttattctccattcttagtggctttcacacatgaggtatgacttaatttgtttcacgtacttaattatggattaataatcatcaccatattatactcatgattttttttattgatcagaactcggaaaactggaagtcctctcatttgacaaaaggaactatcatggatccaaattacagcttgcctcccaatattgctctgataactcttgaggtagagcaacttttccaaggatatatatctatagtctataacactcttgactctntttgtctcanactaaaatgttctgcatgagttggatggtggaattgtgctctttccgttggcacatctata

SEQ ID NO: 302931 - DNA, 415 bp, Glycine max
  unsure (1)..(415): unsure at all n locations
tgccttgaatttctactttntcaggtattgtttgtttgagttatattagtttgttaaatctcatttattttaaatttattcctcttaaactatagggtgacaaaataaggagaagaaatgattggaggagatggatcatgcctggtggtcaggttcctaatgttagaggttctcaaaccgttggacagctggctgaacgagttcaaaacattactctggagagaactaacaataacgatgctggagtattagatgtttcacagaatagaccttttggggatttgaatagtcaatatctccattccactagcgagggtactgctcaagtcggtattcaagtttcagatcattctatttctgcaagaaattagagctgcagatgttctttacaaacattttttgaagaatattcttc

SEQ ID NO: 302932 - DNA, 383 bp, Glycine max
  unsure (1)..(383): unsure at all n locations
agcttatcaaacaaaggtgctgctttgtcttggggaagacccttctccagatatcccaacttgctgtcagtagattctagattagtttgcactaggatagaagtggagaagtctaaaatggtagtagggtttggtagcagtacatactagttatatgcatattgaaacaatgtactttgcagtgctcccccagatgaaattttgctactgataccttcaggcacaaagtatatagtcaatgcttattggacaatatagttagtacttacaagagtacatgtagcttaaattcaatacttagagcactatagcacataccaagataagagcgctagtacaagaagcattctagccttaccagcatanacacgatcatanactct

SEQ ID NO: 302933 - DNA, 247 bp, Glycine max
cgtgggtgcctcggcatggatacctgcaaatcggttctcccgcctggtggggtctcgtatggcggcgtggacacgctcatatgtgtctgggacttgaagactgatgagagagtgcagactgctcacggccatgctcgtgcagtgactcgcattgcctttgacgatggcgatgttgtctccttttctgttgactcgtagggcattgcaatgttataatagctttaaccattccatttgtttattatta

SEQ ID NO: 302934 - DNA, 396 bp, Glycine max
agcttatcttggatatttttcatctacagaacagaatatccagtatttagcaaatattttcaaactttgtaaatgcagataccaacaaatcaaaccttgacatatgacagacctaaacttctataatctcataaattgctttttccacatctaactcttacttctcaagctgtatgtttgcatgcaatcgagatccttgaaatgaatctgaagtattaccatcgttagacgtgataccaacatctgcataaaacataaagccacaattctactaaggaaattgagttcaacaattaatttctacactctaaactccgggaatcatagagaacatatattaattacatatcaaaaaagatggaaataagagaagacactaacagctacaattttcta

SEQ ID NO: 302935 - DNA, 424 bp, Glycine max
gcttgccacaaacatcaagttctttgaatcttttggatattgtttctatttctgccttgatgctcacttagggctcagataacccttggtcacaaaaacttagtctccaacaaaacatatggattgaatccaatgggatgcaaccaccaacatatttggatagctcacaagcacaaggaagaccacgcgtggttctcaccacacaaccacaacttgaaggattcttgccagcatagtcaacacgctctatttcaacaacaatcttatttaaagcataccttgaaaccattccaagaagcctcttgtataacgtttttttgaagacatgtccaacgacatgtgtacttgtttcaaatgatgctttaatctccgtgtgctgcaacgtaatcatgttgttcatggcattctacacactgcataagtc

SEQ ID NO: 302936 - DNA, 374 bp, Glycine max
agcttattcacaggagcagcaaacctcaactcaacagggcaaagatcatcatatatctcttgtccaacagactcagtcttctcattggacttcttctctggaacatgagaaatgaatgtatcataaattgtattgctataaacagacttttcccgtacaaggtctgtggcagatgagttgaatgcaattggatggtataacaaaaaagattttggttttgaagaaccaacccaggtttcctctccatcttcagcaagggagactgcatgatcatcaaggtgtgcagggccataagctgaaacagcgatctcaccagccacctgcataacttctttgtatttgaggccaagctctgcttctactgaaaatgcgtc

SEQ ID NO: 302937 - DNA, 377 bp, Glycine max
  unsure (1)..(377): unsure at all n locations
tgttctatattaatctagtcganaactaattcttcgattcctcttatgtgcttacatctcatagagagaaaatcagagaagagtgttcacatctccagagagaaaactcgagaagaatgatcaggtattaatctaactaatgatttcgcctaatagaaaaaatagatatatcaataaagcacttgtcatttatgactgcctaaattcatcatactaattaatccgctgactaattcctacaacatgaatttggttcaaaatgataaccacaattgtactactatgttaacaaccaccaccataaaagttgttatttcgacccacctaacgccacatatagtgctttctcactgacgtagcattcgtagtgatgatga

SEQ ID NO: 302938 - DNA, 393 bp, Glycine max
agcttcaacatcagaccacttccagggtgctggaactacttcacatggatttgatggggcctatgcaagttgaaagccttggaggaaagaggtatgcctatgttgttgtggatgattcctccagatttacctgagtaaactctatcagagagaaatcagaaacctttgaagtattcaaagagttgagtctaggacttcaaagagagaaagactgtgtcatccagagaatcatgagtgaccatggcatagaatttgaaaacagcacgttcactgaattctgctcatctgaaggcatcactcatgagttctctgccgccattacaccacaacagaatgtgatagttgagatgaaaaacaggaccttgcaagatgctgctcgggtcatgcttcatg

SEQ ID NO: 302939 - DNA, 404 bp, Glycine max
  unsure (1)..(404): unsure at all n locations
taaacattcaatttcgaggctctcgattattacgggtatttaatcaagcatccaagaaaaaatttattgtcgtttgaatttgctcagagattcaacattcaatttcgagcgtctcgatatattacgggactcaatcagacatccgagtaaaaagttattgccgtttgaattggctccgagcttcaacattcaatttcgagcgtctcgatatgttacgagactcaatcacacatccgantaaaaacctattgtcgtttgaatttgctcagagattcaacattgaatttcgagggtctcgatatcttacgggactcaatcagacatccgagtgaatagctattgtcgtttgaattggctcagagcttcaacattcaatttcgagcggctcgatatattacggtact

SEQ ID NO: 302940 - DNA, 184 bp, Glycine max
tttgcccttaaaaatcggctctttggttcactcctgatcactttgattttctctctcgcacagtccaagctttcttccaagtcctaaatgacatttcaagctagtattaactcactttaacctcccttactacagaatcagacttaccttccactcttaagactcactcttttccactcataac

SEQ ID NO: 302941 - DNA, 385 bp, Glycine max
  unsure (1)..(385): unsure at all n locations
ttaattntattcgttcttatgcatgttttcttcttatctaatagttattttttcttactgatctttctagtttgttttttattttcccgcttaccaagctatcgacgaagaagcatccagcaggcaagatcttttccctttggctgctatgtatgtttttttcattactatttgtctctatttgcaaggttttaattttgtttgttcttatgaatgttttttatgagaatcctgaaactgaccaaatacaggctaaaggcctaagtggagaatgacaaagcccccaagtggagaacgatgaaggcccaagtggaaaaggatgaacgcccagaggcagagacactaccaagactattaattgttgctgaaggcccagattaaattg

SEQ ID NO: 302942 - DNA, 302 bp, Glycine max
  unsure (1)..(302): unsure at all n locations
agcttagtttaagttattctaaacctaggagggatttctaaatttaacctagtccaactagagggatctgaggatgaagcttggattgattcagtctaaatttaggctttagatcattacaaaatatgcttagctgagcaacatcttcaaaattgtgattaggacatttcctcagcaatgatttgaattactcctatacttcacaaaagggttcttttgatcctttcctgaatgtagaaatatctgactntacattgatatacctagatggagggaaaaatctatcaagaactttctttcac

SEQ ID NO: 302943 - DNA, 440 bp, Glycine max
aaactaagcttacaaaagtttgtatggcttgaaacaagcaccgaggtagtggtacaagaagtttaatgagtttatgagcaactcaggattcaaaagatgtgacatggaccattgctgctatgttaaaaaatatactaatagttatgttatccttgttgtgtatgttgatgacatgttgattgcaggatctagtatggcagaaattaacaggttgaagcagcagttggcagaaaactttgaaatgaaggatcttggtccagctaaacaaatccttggtatgagaattcttagaaacagatcagaaggaattttgaagctgtctcaggagaaatatatacacaagttgcttgacaggttttaccttggagattctaagaccaggaatacccctctgggatctcatttgaagttttcaaagaagcaatctttgcagacaaatg

SEQ ID NO: 302944 - DNA, 386 bp, Glycine max
agcttatcaaaattgaaaatgatggttcctaatctcaagaatcttagagtcttagattgtgagtcttgccaactaggaaaacatgttaggtcatcatttcctcaaactgtacaaagatgtaactctgctttctctaccattcactctgatatttggggaccaagtagggttacatcttttgattttcggtattttgtaaccttcattgatgaatttttcagatgtacttgggtttatttaatgaaagacagatctgaacttttgcctatattcatgttgttctttaatgagattgagaatcaatttggcaaatcaattaagattttcaaaagtgataatgctaaagagtatttctctcatgatctctcttcctttttatcttcaaa

SEQ ID NO: 302945 - DNA, 411 bp, Glycine max
tggagtaagttcctgagaccgaggactgcttatgaggtcgtagcttgaccatgacccaatcaccttccttaaaggtgacgtccctacattttttatctgccatttgtttcatgaggtcctgagctttcaacagcttcttgcggattaccacgaaggcctcatctctgattttcaaaacctcatctactatgcccaatgtcaaggtgactgtaatgtattgtggtatggtgaggggtttcttgctgaaagtcatctcgtatggggacaaactagagccggagtggaccgaggtgttatagaaccactccacccaatttaaaaacttcccccatgaagacggcttcttatgaacaaaggctcgaagacattgttctatgacacggttcagcacctttgtctaaccatcgatct

SEQ ID NO: 302946 - DNA, 510 bp, Glycine max
  unsure (1)..(510): unsure at all n locations
cgcgcggttgcgacgtttgaggccncctgaatccctcggaattccgtganactatagaatactcacgccttcggataaagatacctgcattcttccacttctcagtactttttataaactctacagggatgcacataccactgtgccatacatattccgccactgcctgatgtaaagttactcacatctaccttatcgcctgattacatctggcatcaactctacaaaacatggcttatttgcttattgtgcttattgtgcgcagagtgcggtatctttggagggcaaagaataccccaagtatgaaatctataatgcccatgttgtacattccatccagaaatggtaacttgccggctaactgccgtttctatctaaccattcaatctctgactagtactttctcgcacgacgtgtccctacgaacatatctttggatggttgaatcatacttgcgcttgtgcgttgcgtcgctacctagccacacttggaattttctctcacaccccg

SEQ ID NO: 302947 - DNA, 200 bp, Glycine max
ctcggtacggggactcccattttgaccagcttttgcatcttgacacggatgagcagcacgagctgagtcgacgcgatgcctatatctcttgcaggatgccacctaatagcaccctttaaactagagaagtctaaagggccgctaagggtttcagcattgacaccgcactatggcatctttcgtggcgctgtcacactact

SEQ ID NO: 302948 - DNA, 494 bp, Glycine max
  unsure (1)..(494): unsure at all n locations
ggctgcanctgatncntntgaatncncctggatnccttcgnanatncccgcganantatanaatancacagcttganttatgaacacgcttatgacaagattctacgctactgnttggagcttaaaccaattagttaagagcccctcattggtcttagattgcttatcccttgacgtcctcactgtcnaacttccatctctgccttgtgtagcagaaaatcaagaagacctctacccttcctggttttgatgatgaatgtccacatgcacctgattaggcaactgactcaacacacctccatctagaacatgacttaatctcatcacctctcgcacggcatcttctttttgcaccaccactggacatccaaattgacatcctatgaacctatcgtgctgggtggtgttcggactctactagtggctaccacgcggtactacccactgcaaatgcgtggtgagacttcactgggatctaaactacgcatctcggg

SEQ ID NO: 302949 - DNA, 403 bp, Glycine max
agctttgcctccactttcatattcatacgttatttggttcaacattaaattgaaccgacgcacatttttcatgtacgtttttgtgagaaatgaaaattcataacttttaatttaactgtcatttgaggaattccaaatggtaaaccaaacacgctatcttgaaaagttcctgtagttacagataacccagtaactgaataatcaagtttgaaaaattcatgtagttacagataacccagctactcaataatcaagtttgagtcaataatcagtccaattctaataaatccttaatccagatagtcacgttgaacagaaaaacataaatttttatgccaaaaaacaaggtataaatgcaccagacacaaatgagtaaaatataatttacgtttaacacaatact

SEQ ID NO: 302950 - DNA, 441 bp, Glycine max
ggaaggatgcttcaacggaggaaaagaaagagggagcgaaagagagaggggggagtacgaaattgaaggaaaaaaagggagagaagttgaactttgagttgtgtctcacaagactctcattcatcaaagctacaactagtgttacgcatgattctatctatagactaggtagcttccttgagaagcttccttgagaaaacttccttgagaagcttctttgagaaaaattccttgagaagctagagcttagctacacacacccctctcataactaagctcacctccttgagaagcttccttaagaagattcctaaagaagctagagattagctacacatacctctctaatagctaagctcacctccttgagactaaaagctagagcttagctacacaccccctataatagctaagctcacccccatgacacaaaaacatgaa

SEQ ID NO: 302951 - DNA, 403 bp, Glycine max
  unsure (1)..(403): unsure at all n locations
agcttagacatatgttttcaatagaaagcaaagatagtcatctcaataaacatacaacacaaaaatgaaatcggtacatttggtatttggttttggtaatattatgtgacgaattcaatccaaaaatcaacaaatgaatgtagacctcataaaagtgtgaatgacaaccttttttttttgtttttccaaaagtataaaacaaataatgaattatgcatagataaattttataaaaaaaaaataggattgtccaagtttgaatttcaatataaaaatacaactcatagtttttgctctgtaaatattgttgaaattgaatcgaaaactgaactatctacttttaanacttaatcggttaaattatgtgaaagtcttacggtattgaatggcatcacaacacaca

SEQ ID NO: 302952 - DNA, 430 bp, Glycine max
tatggattaattcaagttgtttgaatttaattaataatctgggattgttgttattgcgagtatttagatgcgttaaataactaaaagaaagtttttacagtccatgtgatcctatttgcctcgaaacaaagtaatggggagcttggcgtggaagcagcttcttctcaacgctctggaatccaacgctcacctcaagcactcttctttcatgcagctcgtatgtcaatcaaccaatcttttttttttttcttttttttataatttatgcatttttatccttttatttgtgtttcggacaggcaaccctaggaaccaacggaacaccttccaaccgcactgtcgtcttccgaggattccaagacaacactgataacatccaaattaacacccatgcccgcactcccaaggttcttcttattctcgatcagct

SEQ ID NO: 302953 - DNA, 329 bp, Glycine max
agcttggagtgacctttgtgttgacccgagaccgaaatttgtctgtgtgggcgaagtttgaccaaaaccatatcaccaacttggtattcagcttcacggcgctttttatctgctaaatactccatgcgattttgagctttctccaattttttcttgatttctgcgaaaatagcctcgcgatcagtgagcatgacattaacaacatcaatgttagaattctctgcccaatattgagaacagttgaaaggcttcttcgcacatgtgatctcgtacggggaaagacctgagcttgagttccaagaggtgatgtaagaccactccacccaacc

SEQ ID NO: 302954 - DNA, 411 bp, Glycine max
  unsure (1)..(411): unsure at all n locations
tgctttgaagtctagaaactactctgcaagtcgttaaacttgctctgcaactctcataggcctctataaaaactacagtgtaactgaaactctttcggaatgaaattaaatgtcatagttccacaaatttttatgcatttctctctctttctcttactctctatttctctctccttctattttgtagtttcaattcatttctagtagatgtcatccctctctttttgtgtactcaaagtcagaatatgtgtatggccaatttgagtaattaaaaaaagttatttgggtttacggcatgactaagacaaaatgtgttagggtgtgtgtgtgtatcaatgcctattctgtttgagtagtacagcttcaaccttggacctgaaccttatcccatntacccctctgtgagaataa

SEQ ID NO: 302955 - DNA, 182 bp, Glycine max
cgggaactcagagacactgcagcatcacgcttgcagcaacttcgcaccaaaaccaaaacccccgaaaaacaacgggatccaaacacaaagtcggacgcaacggacataagaaccaccacataagacgcgccgaacattcgcatacagcggacatgcaaaaaagcgaccatactgcagcaaaa

SEQ ID NO: 302956 - DNA, 539 bp, Glycine max
  unsure (1)..(539): unsure at all n locations
actagccaccacacgcctaatgccaaaatatatatacaataaaananannanaagacgcagtgagactcctganccntncgaaaacanaanacnnaagannnaacacannaactgggcgaaccaacgaacgagcgcctactaccacctggcacccataacaagaggancaatccgacaagcgcgacccagaaacgaaagcacacctgaccagcaaccccatactggaaaagcaaacccgaaacaccgacctacacaccgaaaaacgcacagcgcgcacgacacaaacgaaaacgagccaagccgacgcaaacccgagagaactccacaaactatacctcatntctaacaactcaacagagaacaaaacagacacacacgaacacatgtgctacaacacaccgaatgacccagacactcacacaatacccacccctctccatcggcaacaacaaacgaaccaccaatcgctcactgacatctctaaacataacctccaacacacaacacgagcgaacccgacaacccccgagcgcccaac

SEQ ID NO: 302957 - DNA, 373 bp, Glycine max
  unsure (1)..(373): unsure at all n locations
tttcatgcaagctttaagaattatggcctcatcgaactacttgtttctcgagggaaattctataaatagacctcccatctttaatggagtgggttaccactattggaaaacccgcatgcaaatctatatagaggcaatagatttaaatatttgggaagccatagaacaaggaccttatgttccctctatagtggccggaagtgcaacaatagaaaaacctagagcatattggactgaggaagaaagaagattantacaatataatttaaaggccaaaaatattattacatctgctctatgaatagatgaatactttacggtctcaaattgtaacagtgctaacgatatgtgggataccctacaagtaacacat

SEQ ID NO: 302958 - DNA, 403 bp, Glycine max
  unsure (1)..(403): unsure at all n locations
ttcatctagccaagattataccaaggtgttacaagatatcctaacggtttctaattatatgggccatcaaatttatcatgtgttgaccgtaattgattagcccatcaatctnctcgggggctgtacacacttcggccatggctttcgctttggctaatagttgtgggaggtcttgacttccattcaaggtcaaggtgaacctatccatacacatagtcgcttcttgatgcaatgcatcaatcaccctccctcttgcttctttctcggcgtacacttgtgcaaaatcctccactagctattgttcatgggtcacagactggttcaactcttccttcgactgccctatgatagctagcatgctttgctccgtggcttccaagtgttgagccacactcctcttgga

SEQ ID NO: 302959 - DNA, 392 bp, Glycine max
agctttgaacactctgatatctttgctccatatacctaggaaaaattgttacaagtctgacacactgtcttattatcacagaatccatattgcgaaaggaatgaagaccattatggggctgccaagtgatatgtagtttctgcatgaacaccatctccattatcttcaacttaagataaacatcaatatactgctgcagcaaactgccgatgttaggcgatcaactaaaagacctcatcatcttatacattataagacctatgatggtaagaacaaatgtccattaaatgaatccacacacccttgcatcttctggaagaaatatctcctccatcattttacgtgaacttacaatatagcttcggagattcaccacacttctagccatggag

SEQ ID NO: 302960 - DNA, 433 bp, Glycine max
tgctgattcttaaaaaactgaagtatgaattcagaatatgtaaaaatactaactacaaaattagaaaacaagctaagagtaatgagaccactaatatgaaaactaaacatcaaagcatggcagggatatatgcttaattttgaaaagagataaagtacttttttctaaaaaagataatcatggagtgaaaaatgtgaacctcacgtagtagccaaaaagatgatgcttggtttatgtcttgtgcaagaacaccatcagatatcatttcattctccatagagccaagtagaaatgcttcaggcttttgcctggaggtatcaaaacaaaatgtgacatcatatgtgaagggacttaattacatgctcagaagtgataactaacaaaaaggaaaataatctctatggactatcacatgactgaggcacaatgataa

SEQ ID NO: 302961 - DNA, 389 bp, Glycine max
  unsure (1)..(389): unsure at all n locations
agctttcatacatcagaccacgttccacgggtgttggaacttacttcatcatgtgacttgatgagggccctatgcacagttgcaaagcacttggatggaaaagaggtactgccctatcgttgtttgtggattgactttctccagaatttacgctgggtcaatctttatccagagaggaaatcagacacctcttgaagtattcaaagagttgagtctaagacttcaaagagaaaaagactgtgtcatcaagagaattatgagtgaccatggcagagagtttgaaaacagcaagtttactgaattctgcacatctgaaggcatcactcatgagttctctgcagccatcacaccacancataatggcatagttgaaggaacaacatgacttt

SEQ ID NO: 302962 - DNA, 428 bp, Glycine max
tcttgcgccttcttcgctcttgctcttttcatgggttctcatatgccttgtattggatcttgggcttccatctggtcatgagtttgggtctggcggttgtcatgggcttgggctttgatgtccacatcataaaatcttatagttcgatttctatgctatggtttataaatgtttccaacacaagctaaatcattttaagcttcttttttcatacctaaagcaataaaattaaatatagttaataaaacatgaaagaataaaaaaaataatataaaactattgaaaaattcatataagttaaaagaataatttaaaatttatgaaatgatctaaaggtaaaattgtacaataaataaagaatgattagtgaatagttacttacttttgattgattgatcaattttaatctgcataattaaaaatattaa

SEQ ID NO: 302963 - DNA, 537 bp, Glycine max
  unsure (1)..(537): unsure at all n locations
tctcaatccacatcactatattaataagaatcgatgtatacttaaaacaaaaaaagcgnatgaaccgtgtgacgcatctagaacccatggcaaatcccagctcggtacctcggagatacccncagagtaccacctgcattgctgccatcttgttatgaaataggacactggaagaacacgcactagacacctacatgccacacagcttgatctgctacgaagtcacgctgcgaaattctaatcccaccacgatacaaacgattctcatgtttccaaagctcaacatatcaactagtcgaccccttggacaccacataacgacatactccaagtcaacgacggcataccaccaaagcctcacggatcgctgcgagaccacgtctaaactggaatacggcccatggacaacccaccaacgtatgaacaaaccgctggataaaaattataaaatctcttaagctcttctcatacctcaaactactttgaacacttataaggctgggacacataagactctatcttcaccgtaggaatccg

SEQ ID NO: 302964 - DNA, 284 bp, Glycine max
ttatttggtacataattgtcttacatattcaattaatttgattgctttcgatatgactcatttctgaatcttaacatatatatgactaaatgaccttgccatctagctaatttttgtttactttacgaaggtaccggagaatttcgattaacatcggattggcccaaaagacacaagatctgccttactattgctagaggtttggctttcttacatgaacaatcaagatctgcctttacatatgaatacccctgcacatggcacattagccaagccaagaatca

SEQ ID NO: 302965 - DNA, 392 bp, Glycine max
agcttcggaagaaagtgatgaggtacaagccctaaaggcagagcttgaaagagcccgagtagtcgaagagaagttcaagtccatagccatcaaagtctgaaaagagtatgatgaactaagggacgtcaatatggccaccgctgatgccttggaatgagaaaccaagaaggcccaaaaggaagaacacgtgccagcaaagttttgaggggctttatagggcagcaatagtgagctcaagctccgaagaggtgaaaggaatcatcacgggtcaaaggcatgatcttgaaggacgagctaaaggcttaccttaggtcgaaaagaaatttgtcctaacagttaagcgagactgaagggaatatgtgggcccgcatcgatgagtgcaaagagaagct

SEQ ID NO: 302966 - DNA, 370 bp, Glycine max
  unsure (1)..(370): unsure at all n locations
nttgagcaattcaaatggtcgtaacttttcactcggatgtccgattcatgcacataatatatcgagacgcttgaaattgaacaacgcaagctctcgtgaaattcaaatggtcataactttcaactcataggtccgattcaggcgcataatatatcgagatgcacgaaattgaacaacggaagctctcgagaaattcaaatgatcataacttttctcacggaggtcagatttatgcgcataatatatcgagacgcttgaaattgaacaacggaagctctcaaaaaattcaaatggtcctaacttttcactcggaggtcccattcaggcgcataatatatccagacgcctgaaattgaacaacggaagcttt

SEQ ID NO: 302967 - DNA, 383 bp, Glycine max
agcttattaacccaagctcttagcttcaatgcaaggaaacatacttatggctaaaaatctaaatttttgttttggaagtggaaaggccagaaaattatgacatgcttgagagggtttttactcgaatttggctgccccatgagggatactttgcaccttggtagcatgaaaaatacctttcaatggtatgtatatatgtgtgtgaatataggtagcatggaaaacacctttcaatggtgtgtatatatgtgaatatatggcatacaatcccttgcaaagtgtgaatgagtagcttcctaaatgaatatatgatggcacataattcccttttcacatgccagtatgtgcatgacgtaggtagctttccaatgtgcatatgaata

SEQ ID NO: 302968 - DNA, 344 bp, Glycine max
tttctttgtgggttgatgtgttctatcgcacaaaatgtcttgatcactgactgacatattctcaattagctcaattgcttctttcgacgtctttagctttatttttccccctgcaaaagcatctatcaattgcttggtttgtggtctcagcccacctatgaacatattcaattgaattggctcagaaaatccatgggtgggagttcttctcaataaacctttgaacctttccaatgcttcactcatacattcatcatggaactgatgaaatgaagagattaccagctttaccttccgtagtcttggactctgggaagaatttctttacatatttttcaacaact

SEQ ID NO: 302969 - DNA, 281 bp, Glycine max
agcttatccttatggcctgccttcggacttcaccccctgtgccaccccggaagacttaagccaagcccttactttggaggggcaactcccaccttatgaagactatcccgggcaagacgatggggaacgagatacccatcttggccccctgctccacctcacagatccgcccccacatgaactaccccaaccgaacatagtccgccatatcccggcctcacccacacccgtaaaagaatctgtccccttcgcggaagataacggacagattgatgcgcttg

SEQ ID NO: 302970 - DNA, 423 bp, Glycine max
  unsure (1)..(423): unsure at all n locations
tcacgctgctcaattgcttcaggatgctttatggaatgtcaaacgtctgtatggtggtcagcagaggagcacaaaccacaaacccttgcgacaggtacagatttctgattcaccgccagctgggttaccaagttaaccaatgcatccagtttgccttcaagcttcttagcttcatatgatgcagatgggcttgtagctacctcatgcactcctctaatgactatggcatcatttctggcgctaaattgttgggagttggaagccatcttctcaattaaatntctaacttcagtaggagtcatgtctccaagggctccaccactggcagcatctactatacttctctgcatattgctgagtccttcataaaaatattggagaagaagttgcctcgacatctgatggtgagggcaactgacacat

SEQ ID NO: 302971 - DNA, 404 bp, Glycine max
  unsure (1)..(404): unsure at all n locations
agctttcatagatatttaccataatgtttacatcgctcaagctttcaaatttaaagtaccaaagtacacaacataaactagtacatactgaatataaattagtcatatccaactacacatcctaataacaaaataaaacaagaaatgggtcttcacttttcttcatttttatactggatctttatcagcagccttccttccagtgaacctcggtgttggcatgtaaaataagggtgttgttggtgggccatccacaacaggtgcgtctactgttgaagtgtgtgaaatgttcttttgtttgggtcttgttatgtctagcttataccttgctactgggtggaacatcacaatagatgcanggacctacatgcaaatgccanacatgaataacacttgtaatatat

SEQ ID NO: 302972 - DNA, 439 bp, Glycine max
  unsure (1)..(439): unsure at all n locations
nttaataganaattataacattctcccacttggtctatatgttttgactcattggctaaaataagtcaatgctcaatttccttaaagaaatgaacatgtgaatcatagtgatagtttctcttataacgagtaatatcatccttgtattacaacatgttcaatttcccaagtagtatacttaatgtaataataaaacttaatgaataaactcaatgtttattgttggtccaaaacatagattttctcaaataaatcaatgtgcacatgaatatgagaaaatatcacaatgtaagagtttcaactctgacctgtatgtatacaatcataaagtggaaccaagtcttattctctctacatgatccttgaacttaaatggtgacatgtccttagtcaaaggatcaatgatcactagcttagtgcttatatgctcaatgatcat

SEQ ID NO: 302973 - DNA, 398 bp, Glycine max
  unsure (1)..(398): unsure at all n locations
agcttagcaaatggttctgngtgttgcccagtttcatcatatcttccgtaatactcatcacctctatcatatctaataattttcacatttatgtctaattgcccttttacttcattgtagtaaatttctaaggcatccattgcctaagaaatctcgggcagtaagtagacataactgtaacgtgaataatcataaaaaatgatgataaagtatcattcctttccgaaagaactaacatcaaaaggtccacaaatatcagtatgcacaatttcaagaagctgagtgcttcttgtagctcctttctttgtatgttctggttgttatcctttaatacaacccacacaaatatttagatccgtacaatctagataacgaagaattcatcttttataatcttt

SEQ ID NO: 302974 - DNA, 442 bp, Glycine max
  unsure (1)..(442): unsure at all n locations
tanaacagtgcagaatcaagacacaattgcattaaacttatcttctttgtgttcttgccttctttttaaggtagaaaactcaaaaaaatcattttcttctgtttactacatttcaattcatattttttctttaaaccatttatccaaaattaatttctttctaattattacttattttaattattggattaaacatctttttgatctttctaaatataaaaatggcttttggtcctctatttctaagagattgtcacagtacatctatatcactcatctcgttcgatataagtggagttaacggtaatgcagtttgtgacaatttaccagcacatcaagatataaatgatatattcatagtgttttaaccacacaaaaattgtccctcatccctagtcgctgaaacgaacttaactccaaacttttactttcttaccttata

SEQ ID NO: 302975 - DNA, 344 bp, Glycine max
agtcttctctatatgttatgctcctgaatcggtcatccgggttaaaagtcatgaccatttgaatttctcaagagcttttgttgttcaatttcgaacgtattgatgtattaagcacctgaatcggacctccgaccgaaaaattatgaccatttgaatttctctagagctctcgttgtttaatttcaagcgtctcgatatattatgcgcctgacttgtacctccgatggaaaagcgatgaccattttaatttctcgagagctcccgttgttaattttaagcgcgctatatattatgctgcccgaatctgaccctacagttaaagctatgaatattcgaatttcccg

SEQ ID NO: 302976 - DNA, 393 bp, Glycine max
gtcataactcttaactaggatgtcccattcttgcacataatatatcgagacgctcgaaattcaacaacggaagctctcgataaattcaaatgttcataactgttaactcggatgtcagattcaggcgtataatatatagagacccttaaaattgaacaacgaaagccctcgtgaaattgaaatggtcataaattttaactcagatgtcatattcatgcgcatgatatatcgagacgctggaaattgaacaacggaagctcttgataaattcaaatggtcatatgttttaactcagaggttcgattcatacgcattatacattgagatgctcgatattgaacaacggaagcttttgagaaatcacatggtcataacttttaactcagatgtcat

SEQ ID NO: 302977 - DNA, 164 bp, Glycine max
  unsure (1)..(164): unsure at all n locations
agcttgcttctacattattaaactaatatagggaaattaacanaaagtaaaagagaggggtagagaaggcttcacttagggctaaggagctttcaaaatctctcttatccatggaaccctcacaacctccttgaacaccaataacttggtcttccaatgaacct

SEQ ID NO: 302978 - DNA, 433 bp, Glycine max
  unsure (1)..(433): unsure at all n locations
tcctaagcaagagaccaaattgagactcttagtccccctttctctcttaactggcacaccaccctaggtcattctagggttggtgtggccttatatagggggtcttaatccacctgngttaaggcccaattaggtcaggtgccctaattgaatcttaaaactctctattaagcttcgtgatacttaaccttagtctttagttactctaaattattaattccaactctaactaaatctctttatcaattaaattatttttttagttttttttaatatatttaccaatttgtcattaatgagttgacaaagtcaaccctttgccattgaccctagtagtctatggttgaccttgttgactttctctaattnttactagaaaacgagtatnttttttctcattnttccttttaatctaattttctataattctaat

SEQ ID NO: 302979 - DNA, 398 bp, Glycine max
agcttgccaagatcatggcagacttcgaggcctggctgaaggagttagagtccaagctgaaggagttcgagcagcgggcgactagggagagagaggtcaggcagcaacttgaagaagagttgctgatctacaagaatgaggttttggagcagcatgagaaaggctttaaaaaggttgtcaagcaggccggattcttccaaaaggaccttgacttgggtctttttgaccctttcaattgtttttggaaggttattatgactgaatttgattgtcaatgtttttcaaaagacctagtcaattacccatgcatttagatttgtcgtgctcatctttatacatgttctaaaatcacttaataatatggttattagttttaaaaataaataatacaacatatg

SEQ ID NO: 302980 - DNA, 351 bp, Glycine max
  unsure (1)..(351): unsure at all n locations
tgcctcanagagatctaggaaggataaagcggctgatggacccagttctgctcccgaatatgacagccaccgttttaggagcgctgagcacatcaagggatggtcatttctctgggagcgacgcgtccagctcagggatgacgagtataccaacttccaggaggagatagttcgccggcgttgggcatcactggttacccccatggccaagtttgacccagacatagtcctcgaattttatgctaatgcttggcctacaaaagaaggcgtgcgagatatgcgatcctgcgtgaggggtcagtggatcccgtttgatgcggatgctcttanccagttcctgggatacccttt

SEQ ID NO: 302981 - DNA, 383 bp, Glycine max
agcttgtatggcaaactggatgcattggttaacttggtaacccagctggccttgaatcacaaatctgtacctgtcgcaagggtttgtggtttgtgctcctctgctgaccatcatacagacctttgcccttccatgcagcaacctgcagcaattgagcagcctgaagcttatgctgcaaatatttacaatagacctcctcaacctcagcagcaaaatcaaccacagcagaacaattatgacctctccagcaacagatacaaccctggatggaggaatcaccctaatctcaaatggtccagccctcagcaacaacaacagcagcctgctcctttcttcaaaatgctgctggcccaacagaccatacacttcttcaccaatccaac

SEQ ID NO: 302982 - DNA, 392 bp, Glycine max
tattctttatctagagtagttgagcatccaacttactactgacatatattcgactgtagtagtggacaatgtagttgagccttgcatcttgcatattcatgttactaagttagcaccgataaagtaatagcttccactagagctttttctttcaactctatcaccaacatagtcaacatcataatagcttgcaagtctgaaactctctctatttttgaacataacaccaagattagaagttccaattaaatatctacaaatatgtttaatttcacttaggtgaacttccctttggtatttttgaaatcttgcacatagataaacattgaacataatatcacaaatggatgcagtgagatagaccactgagttgcatccactttttttgatcc

SEQ ID NO: 302983 - DNA, 392 bp, Glycine max
  unsure (1)..(392): unsure at all n locations
agctttaataggtagattcttcaacatgcactttactttctggtcaaccaatctaaaggatgttttttcctagagaggatgggtttgtactttggtgggctgcctaaggtctctcctaatggggtgcagactgtatttgtattgcttttatctttgtattttcagtacacctagtactggatttcatatataatatattgatttttgctgtgcaaaaaaaaaagaaaactgagtttttaactanagtaagaaactctttgaacagagtcagagtttcagatttacttttcaacacataaagccaagtaaaacgagtgtgggcatcaacaaaggttacataatatctgtaacctgtgttggacaagagagaagaccccacagatctgtataaa

SEQ ID NO: 302984 - DNA, 422 bp, Glycine max
ttaacattaattaaaagctcactgttgtaggggcaatcacttatggtaatttttatgcatgtgactgaacttgagccaatctatatgaaataaaataaatgcattctcagggtttcgttttgctgaatgctacaggctttgcaaaacttttttgctgctttagtctattctgcaaatactagttttgattctctgctggagtcactactagcctgtgctaagccttctccacagtctggtggcattgctaaacaagctttgcattcaatagctcagtgtgttgctgttctatgccttgctgctggtgatcagaagtgttcatctactgtgaaaatgcttactgacattctcaaggatgacagcagatctaactcagtaagtctttttctccagtactcttgacgtgtagtgatattaattga

SEQ ID NO: 302985 - DNA, 419 bp, Glycine max
  unsure (1)..(419): unsure at all n locations
nacccgcctgagcctttgatacnctgaatacccgaantctcaaactacgcttgatgttgtctgtatgaaaatcttctgcaacctgttcttccatatagaaatgattaggcaaaattgcgccagagataaacacaataccgaacacgagccggagaaaggaactgggaagcttaccggtagaaaaattaaaagtccaaacaaatgcagcggacccctttttatgtcaaaactctattatttcttccttgacaattttgtgctanctgtaactgggggaggcggggaagggagccaacacctcaactaaagactcttgagcattcaacttgacgcgaatataatcttcttaaaacaagtacagatttctttggaaaacacaaaagggctcgctctaaaagcctaaccatacaacataatcg

SEQ ID NO: 302986 - DNA, 311 bp, Glycine max
gcgaattcagctcggacccgggatccttaagtcacctgctgcatgcaagtttatggtgatgaaccaagccattttgatgatgccaaaagtccaagtgattgattcaagattgattcaatactcaagatcaagcatcaagaatccaatccaagattcaagattcaagagaagaaatcaagaagctacaagtcaagacttcatataggataagtattaaaagaatctttcaaaaaccaaatagcctagcttagtcttacaaaagaattttctcaaatcttctaagctactagagtgattactctctggtaatc

SEQ ID NO: 302987 - DNA, 391 bp, Glycine max
ttatactgttacctctatgtttcttctgtcctttactttattggtctacatattagatgcaagactactttatattggtggaattattttgctactgaccttgttttgatactaattaatttctatttcctatagtatgtttatatttgattgctttctctgcactaatattatgtgttgacaatgcccttatgcagcaacaacctaatacaatgactattattgtccctcggcatcgacagcaatgactatagattgtcaaagtaacgttctatttctcatattctttcaaatcatgattttggttccctacagatatctttcatacgaggccatccttacttcagactaacggaataaaaagaaaccaaaacagcaagttaacccatat

SEQ ID NO: 302988 - DNA, 337 bp, Glycine max
  unsure (1)..(337): unsure at all n locations
agctttagatcagtagtgtattgttcactcacgttaatgcaatgcattgttcactcacattacaacactgaaatagcagaaaacaaccgtcaagggaataactttagaacaataatgctgaaaacaagcttcataggctccaataatttacacccgtgaaggttgcacatgcatgaatagaataaaagtagtcatgaagcatgcttatacggtcatttatggtgaaatgatttatgatagcatggaatcttgccagaaataaagtagtcaaatttaacttatgctgtaaacatgatttatgatagcatggaccaacttgctntaagttggttaaatt

SEQ ID NO: 302989 - DNA, 423 bp, Glycine max
tcaaaatgtagttaagactgcagacaacttctgttcatgtttgaagcttgatagaaacacagatgttagctatagtaatatgaggaaggctgcttcttgggaagatttgactgacaactatttattctgttctaaagctgtagatcctcagtacaaggatttaaggcattttcagtggcattgggaaaagggggagcctgtcattgtcagcaatgtgcttgaatgtacatctggtttaagctgggaaccgcttgtcatgtggcgtgcattacgtcatgtaactaataccaagcatggccaacatttggcggagaaaacaattgattgcttagattggactgaggtttgcttaatttcccaatctttaactctattgaccatggagagctctttacacaaatttcattcttcaccttcattctc

SEQ ID NO: 302990 - DNA, 475 bp, Glycine max
  unsure (1)..(475): unsure at all n locations
tgaacctctcacaccgatggaacgaatcgactgattgatccattaanatcaggagagtgagcgggtgaccctgtgatacctcgaacacataggcgataccactcggaccgcggatctctaaagtcaaccgcttttgcaagcttcaggacaagaacacataggaaccgaaagagcattcaagagaataacttacaagagacggggtattacaattatatagatggcacaagagtaactacttgggacaacttaacgcacttagtaccaacgacaatctgaagaaccatgacaaactatatcctgctagatccccctcagctacgaaagccatactagctggaatacgcacttaagacacgacccacaaggtttatccatatgcccatgttaccacacagaaatcgaagcaagctcaaatacattatcccttcccgaatacacgacatcaactaaatgtctgctctccctgataacc

SEQ ID NO: 302991 - DNA, 290 bp, Glycine max
gaactcagaatactacgcttgatgataaagtgagatttacgtgtatgtgggttactactcaagatccaacgggtgcacactctataatccacatcgtagaaagaccgtcctaagtcgcgacctggaactcgacgaagacgattgttgggatcggaatgttcaagacgactcgtatgatttcctcccttactttgaacaacatgatgacattgaacaacctatcctataggaacatattacactaccttcctcaccataccaacgctctatgaaacaattccacgtgagag

SEQ ID NO: 302992 - DNA, 336 bp, Glycine max
tttcatgcaagcttatcaaaactgaatataatggctcctaggctcaagaatcttatactcttagactgtgagtcttgctaactaggaaaacatgttacgtcatcatttcctcaaactgtacaaagatgtaactttgctttgtctaccattcagcttgatatttggggaccaagtatggttacatcttttggttttcggtattttgtaaccttcattgatgaattttccagatgtacttgcggttatttaatgaaagacagatctgaacctttacatatattcatgtcgctctctaatgagattgagaatcaatctggcagatcaattaagattttc

SEQ ID NO: 302993 - DNA, 418 bp, Glycine max
tgggggtaaaacttgatttgtatagctagaagtggttatgacacaagacttgtaacttgtgagaagtaagtggaacttggtagtttgccaagaattggatgtaatcttagtggtagagacgaaatttgtagtttgtgaaccctaatctcccaatttcaattaaattttgtttatttagccagttgaattgttgtgttgcattacttcttatttgggattgatcactccaaaaacctaattcattaatgtatgtttggattaaagtttgcaaaagtgtcttaagtcttacttctctataactgagttcttacgccaaattttactatcacacatatctttttgggcaaccaaacatgaccctaaactgattttactctacacacactctgggaacactcccattggaaatccaaacata

SEQ ID NO: 302994 - DNA, 379 bp, Glycine max
ctgcagctttgatgggttttaaaaatccatgtttgtcatcatcaaaaaaggggagaatgtgaatgtatgtttacatgatcttgatgatgtcaaagaagaatctatcaagactgcttcaaatgataagcatttgcttcaagaataattcaagattgcttcaacaaacaaagccttgttcaagattcactaaagaccaagccttgccttaaaacaatgtgctttcaagacatgcaaagctctggtaatcgattaccaggaagtgtactcgattaccagatgacagggttgagaaatagctgctgaacaaggctctgaacttgaattctcgacatgtaatcgaatatcgtatgtctgtaatcgattaccaacaacgaaactt

SEQ ID NO: 302995 - DNA, 441 bp, Glycine max
tgtaatagtttgtctgtgcaataatatcaagttcttttttggatctttcctccttttcccccaattttttctctgaaatactgtaagtatgaatctcactatgtctggctaatccttttgaaggcaccctcaagggaccttagttatctctatttggaaaatgcgaatatgatttagaacccagttgttgtaaatagtgtttttttttctacttattcttttcttttgcttgtttttcgaaaacctgggatttttaagcctgcaaaggtgtgcccttgatagctgttttttatgaaagtcctttttggttaggcgggtgcttggaggaaaataagatcaagtaagacccaaagaagtgtgggcagttctcgatcttcagtactcagcttaatatccacaaaatcgataaggacctgtgtaaaaaaaaaaaaaagagtctgg

SEQ ID NO: 302996 - DNA, 358 bp, Glycine max
agctttacttccactattttaattcttattgcaggattctttccctaccatgctattaattgattgcctttatctattctttttaattaattcttacctctgaattgaaccttacttttttgcttgtccggaacattttataccaatctgccttgcgtcactgctttacgactttaccattaagacgggtgatattaaattaaaaaaaggacatatatattatcaacatcataattcttatatgtactgaacaaaatctcaacaattttagacattatgaccgacctgcaagagagggactaaagagtatgtcgatgctgatgtgaaaatattttgattcttgcaagcagctgacacg

SEQ ID NO: 302997 - DNA, 450 bp, Glycine max
tactatagctatattgagttattataactccaaatatatcatgtacattgtatagagtccataggagtgtaaagcaaacaaaggcggctatatcccaagttaagaaatgatatacgaactataggtgttaatagataattgctataataggaaaatgatataggatttggatggattgaatagtgtaccacttagtccagtgtgtttaaggatgattgtgattgaattatttttgggaacattcttccatttgactatgaacatgattttatgtatattgaaatgagtgcgacatgtaatgcgtggctcttatgtgtatgaaatgtcaacgccatggtacatgactaaaatttgaaatgtctagagaacctactccatgtgggataggattctccatgtgatgtaaccatgtgcatcctatgtaatcatgcatcatagatgtgcatatgc

SEQ ID NO: 302998 - DNA, 319 bp, Glycine max
agctttgagggcgcgtatcccaccatcttttcatagtagagtaccgataatgtgtctaccatcacgattatcgctctcctttttgcacatgttctgtagttgcatcctatccggaaccatatcagaatagtactgatactgcctaacgaaggtaaccattaggtccttccaagtatacactcaggaaggttcctaagttagtataccaggcgacagttgtcctagtaagactttctcaggaaaaatgtatcagcagtttctcatcttttgcatatgcccccatcttccgacaatacatctttagatggttcttggagca

SEQ ID NO: 302999 - DNA, 448 bp, Glycine max
  unsure (1)..(448): unsure at all n locations
actcaagctntggagcttgaagaagttttgtctttntacatgtccttctctttaagtgacatttgtattgattgctgcattttagtctctatcttttcatatgtacatcatgcatcatcatgtagaggtaggaagattgtatctaaagttagaaacttcttcagtgcataaaactctctattttaatcgattacaaggcttatcgtaatctattacacaagtgtctgtagcttgtagagagattctagttttgttttaattgattaccaggtaaccctaatcgactagataattcagttgagatcgtgtctggtctttcatgagtctccgctttaatcgattaccaggtgatcatagtcaattactttgttcttaaagatgttcccanaagtgatcaagaacactttaatcgattacatcaagaatctaatcgattacattgttcttg

SEQ ID NO: 303000 - DNA, 403 bp, Glycine max
  unsure (1)..(403): unsure at all n locations
agcttgccgctggatctgacccatgaactgccctaattcttttagactggtgatccctatgctcttgaccttgacttgatagaatctctttttaagcgaaggcatttgacttgatcccatgttttactaaagtgaacaaaaatcggtgcgaatcaaaaccccaacatctttcatgggtggaatggatgaacgcatgaggaaatgcatatgacacgaatgcaatttatgaacacggtagcccgggaaattgtctctttcttagatacaacatcttggggtagcaaagtgcccgacgtatgtattaaagaaggtgacacggaccatcctttggttctccaatgtgcgtgatgcanatgcgaaaggcgcaacgcgggaatgtacagtatgacaatattcacaaaat

SEQ ID NO: 303001 - DNA, 441 bp, Glycine max
  unsure (1)..(441): unsure at all n locations
ttagaaaccctaatttgaggaagaagaagcaagtgattaagaaaatatttgataactttttaaattttgcattaaagtccagtctacatgtcacattttgggacaatttgtcacgttggatagtctatgtgacactaaaattgccaataatgcacctcactaacgcgttacttttaaatttaacgacaaggactattttgcaaaacttatgcaaagatagggactattttttacatttcaaaaagatagggactaatttgtaaaaagggtcaaaagtcagggaccaaaatgcttatttactcgtacaataacacttgttcaatgtttgactaaaaaaattgtcatgagacaacacanaananaaacgaagcataggacaaagtctaaaattcttgttactcaccaaaccacatgacaactntntccatagcatatgttatg

SEQ ID NO: 303002 - DNA, 369 bp, Glycine max
  unsure (1)..(369): unsure at all n locations
agctttcttcttgcgatgaaacaaaaaaccacagaaaggtagtaaatgatgcacatacaacatcaaaaccgaacaaaaaaaggttgaaccttttgtactaatcataaaaaatcataaaaaatgaacaaagattgaagctttattgttgcgatgaaacaaaaaaccacagaaaggtagtaaatgatacacatgcaacatcaaaaccgaacaaaaaaaggtcaaaccttttgtactaatcataaaaaatgaacaaaggttgaagctttcttgttgcgatgaatcaaaaaaccacaaaaaggtagtaaataatgcanatgcaacatcaaaacccaacatagcccgagcaaaatggtacataacaacaaacca

SEQ ID NO: 303003 - DNA, 421 bp, Glycine max
ctgtactcaatgaagtttattcttactgtgacgagtttcatactttatatactgtttgtctcttcccttgtagtttccatagcagcagacacatcatccatttcacaatcccaatccctcagttctggaagaaccatagtttctccaaatggagtctttgaacttggattcttcaatcttggaaatccaaacaaaagttacctcgggatttggttcaagaatattccgtctcaaaacattgtttgggttgcaaacggtggcaacccaataaatgattcctttgccctcttgagcctaaacagttctggccatttggtccttacacacaacaacactgttgtttggtccacaagttctctaagagaaacacagaatccagtggcaaagctcttggattctgcgaatcttgtgataagggatg

SEQ ID NO: 303004 - DNA, 396 bp, Glycine max
  unsure (1)..(396): unsure at all n locations
agcttataagaatactcaataaacaacttaagagagaagtagaaatacttggtctatattagttcactcaaatagagctacgtccagctctcctttacacaactataaagggatccactaatcaaaacttccattacaaccaggtattctatcctatcactcttggctataaaagtattctctatgtcactcttgacacacccttagactccccctgaatctaagaacactcaagtatggtttaacactgagccacttttgattttctcaaacaaaagtttgaatgaatacaatgattcaacaacactcaaagagtggataaatagttaaactcanatgcaaataactntgcttagcaaatgatgaanagattaagtgttgagtatatcgtccact

SEQ ID NO: 303005 - DNA, 402 bp, Glycine max
tcatccgtgggtcaaaaatcatagcaattgaaagaatgacattatagtcacttcaatacttgctaaacttttccatcatcaacactgacatattttgcaatactggatcatcacacttaagtgtttctcgcaacaaccattcaattttccatacttgcatgaagtattcattgggcttgtctatttgtcttaagtttaggctacgaaattggaatttgtctattattgaatttggttgctaacttgctacaaaataaaaactgaactacctaacaattataaataattataaatttataataataataaaataaaataatatattatttaaatattgtgggttgacgggctggcccatcaacccacgggttgagcccacctaacccacgggctaagtgggcc

SEQ ID NO: 303006 - DNA, 357 bp, Glycine max
  unsure (1)..(357): unsure at all n locations
agcttagacgaccttgtttgagtcgagaatactttattatttatttggacaagcttgaatatgatgtagaagaaaatgaatgtgagcctttgtccncatcgaaagacttgtaaaaaaaatgctttaacaatacttttaatcaatatttgaatcctttttccttattagtatatatgcggggggtagagggtgtcacatataagactgtaaacattgaagtcctttgaaacatanagcataagatatcgcagtcttttgaaacataaaacaaaggacattgagtcctatgataaaacacaggacgttgagtcctatgaatcatgcactcgcattttggaaatttgtctataatgagaa

SEQ ID NO: 303007 - DNA, 435 bp, Glycine max
tatgcgcatatttccttacatacgttctcttgcacattacatttaaccgaaaaagtgcacccatatacaatcaaggcagcttcattacctagattatttacacgtactgccaaggtgtatttgttacttacatcacacacatctccttggctgaatttgcatacatgcatactcaaagcattttggggtaccaaaaattgcacatgtgcacatcttggtatttctaatacctatatatacacaaacttcatgatgaatcttgactatcttcacaaaaaggtgctacacttcatcccttttttcaagtttttgctacctaaagccgcatgcaaattcaagcatattttcctttgcggactaaaattgtattcaaattaaaaggtatattttttgtaatatgttttcttcacataacatgcaacatatttatatata

SEQ ID NO: 303008 - DNA, 393 bp, Glycine max
  unsure (1)..(393): unsure at all n locations
agctttattcaagacaaagaaattaaagatattcaagatggatgatcaagacagtctttagagtcttagaaagggtatattaaataggaagggaattccaattgaagtagcaaaaggtttggccaagaaatttaagttaaaaagtcttttacaagaaatttactctctggtaatcgattaccagaggatgtaatcgattaccagtggccaaaactgatttacaacagctattaaaatttgaattcaaaatttgccctgtgtaatcgattacacatatatggtaatcgattaccagcagtttctgaacgttttaattcaaattctatagattgtaatcgattacacatatactgtaatcgattaccagactagattttcananaatattctcaa

SEQ ID NO: 303009 - DNA, 431 bp, Glycine max
  unsure (1)..(431): unsure at all n locations
tggtggagttcactgagaatcatggaatgttcgggttgggttacgagcctacatatgccgacaagaagatggttaccttagaaaggaaggagagaagcctggcccatctacaagggcgaggactacaagtggaaagggtccccatttgtcacatcaacgaaagctttgtcagtgcaggatggatgcgtgaggattaggttgcagtgatagatgaagaaacccctcaagaccgaccaaattgggtgcagccatgtcctccaaactttgaattggggaattgaaaaattgtcaaacgacccaagatttgcatgacaaattcaatgtaatccaatagttccaaccctattgttgggcctaggctntggggtctgctcttttgttagatccgatgttgagtcctgtaagagtaacaatatcgaggactcggacgt

SEQ ID NO: 303010 - DNA, 361 bp, Glycine max
  unsure (1)..(361): unsure at all n locations
agcttttatgggatcaaggagtctatcatgtgttcaacaagatggacgaggactccaagcataccttaatagttaaaggtttagtagtcgctaaacaacaaaagtttagaaaaaccaacttaaaggctatgaaggtggccttggaaaaaactttgaaggaggctctagaagtggatgtgcacgccatcaacaagccaaacaaaagagattcgccaagtccattcctattgaaggccttggtctggatagctttggcatggcaagaaaaattaagaagatcaatgttgggtagaaaaagaagaagacaaccagancacaatcctaaagggatgaagagaaaatgtgattttgccaaggaaca

SEQ ID NO: 303011 - DNA, 407 bp, Glycine max
  unsure (1)..(407): unsure at all n locations
tctatagaaggtccgttcctaatttctctacaattgcatcacctctcaatgagctggtgaagaagaatatggcatttacctggggtgaaaaacaagagcaagcctttgcttttctcaaagaaaagcttactaaggcacctattctagctcttcctgaattttctaaaacttttgagctagaatgtgatgcctctggtgtgggagttggagctgtattgttacaaggtgggcaccctattgcttattttagtgaaaaacttcatagtgccaccctcaactaccccacctatgataaagagctctatgccttaataagagccctccaaacttgggaacattaccttgtttccaaggaatntgtcattcatagtgatcatcaatcacttaagtacattagagggaaaatc

SEQ ID NO: 303012 - DNA, 382 bp, Glycine max
agcttcaggctgctcaattgctccaggttgctgcatggaagggcaaaggtctgtatggtggtcagcagaggagcacaaaccacaaacccttgcaacaggtacagatttctgattcaaggccagctgggttaccaagttaaccaatgcatccagtttgccttcaagcttcttagcttcacatgatgcagatgggtttgtagctacctcatgcactcctctaatgactatggcatcatttctggcgctaaactgctgggagttggaggccatcttttcaattaaatttttggcttcagcaggagtcatgtcttcaagggctccaccactggcagcatctatcatacttctctccatattactgagtccttcataaaaatattgg

SEQ ID NO: 303013 - DNA, 422 bp, Glycine max
ttgctaatttagttgtctctggcgaaattatcgaagtgggtctgagaagaggcaaatttgattatcctgctttgatgaatgggaagcctgcggaaaatggagagagtaagaatgagggaggaacccatgttgtgactaccatgcctacatggaaaaattcctcaccagctcaacaatatcaatactcagccaatatcagcccttctcattacctaccaccctatcagccaaggacacccaatcattcacaaaggccacccctaaatcagccacatagtctgcctgctgcacatcaaataccaaacaccacccttaacacaaaccataacaccaaccagggaaggaattttccagcacagaagcctgtagaattcacctcaatcctggtgtcgtatgctaacttactcccatatctactcaat

SEQ ID NO: 303014 - DNA, 248 bp, Glycine max
agcttctgggagcacaaatggattggggaaaagccactaaaacaactttttcccatatcgcatctgataaatgatggacaggaggacattattgtaaacaaggcaacttcacatgggattgcgagtgcaagcgacggtgcaacctaattgtctcgaaacagcagcttctacaaagctaactctcaagatgacggttgccctcattatgtcgagcggatttgcgtgaccctattaatggatctagaata

SEQ ID NO: 303015 - DNA, 261 bp, Glycine max
taaggtttaatcactgtatgaatgagtgataataccttcagctgctaagaggtcaatcagaacgactgcgcagcatgtgcgcagtactcactgagtcaagaacgggggaggagaggaacaactaagccagtctcctttttggggctgtactcactacgatcgactttgaccgggaatagcaggtgacactcaaaccccactcgttactcgtgcacgcctcactttgcaggtgagattaccaaaatctccctgtgcttgaag

SEQ ID NO: 303016 - DNA, 238 bp, Glycine max
  unsure (1)..(238): unsure at all n locations
gactccatctctcnccttgccccacaacagatgcatttcnatatgttccgccattcataactcgttctgctccaacctcgcttaatccaggtaaaagaaccaggtcatcccctacgtatttaggaatcatatccattcccaagctccacctgagatcgtcctccaccctgtcaaacatggntaggttcctcaatcgcccgaaccacgcgtcccctaaccatctgatgtcttctgcatg

SEQ ID NO: 303017 - DNA, 135 bp, Glycine max
tataatgaaaaaaaataaaaaaaaataagaaaaaaaaaaaacaaaaaaggttaaaccaattcaaaaaaaaataaaaaaaccaataaaaatcaaaaaaaaaatagaataaaaaaaaaaaaactcttttaataaaaa

SEQ ID NO: 303018 - DNA, 172 bp, Glycine max
ttttcatgcaagctttgagcttattgaagggacaataactgtatacacggacgccccgttgactcccgtcagatatcgagacgctccacacctacatccgaagcttctgagaaaactgaattgacaataactttataccccgatgtccggctcgagcctgtaatatatcgag

SEQ ID NO: 303019 - DNA, 182 bp, Glycine max
  unsure (1)..(182): unsure at all n locations
ttatttnnatgaaaaanatgnaaaaatgatgatttggaaattttatgnaaaaatgggtatggatgtaantatgtggaaanttaaagtgtaaatttttatggtnatgtgatgntaaggttaaagattaatttnntttattttagttaaangaatgtttnaaaatatgttttttataaattgtg

SEQ ID NO: 303020 - DNA, 286 bp, Glycine max
  unsure (1)..(286): unsure at all n locations
aagaaaacaaaagaaaaaaaagnncccgggcaaagnncagaagaaaacaaagggaanaagaaaatccctgancaaagaacggaagaaaangaaagaannatgnagaangggcttcggaccagacaaatatccaaacaatacaaaatagccataaccaaataaggaaataaaggaaaccacgacttgaagtagtcctctccctttggttaccaaccaaaatcctatgcgctaatgactttcttgccccgcactaaacaaaaacagaaaaaggaaagccaaaacactt

SEQ ID NO: 303021 - DNA, 226 bp, Glycine max
atttatcctatgggcgacagacaatgggcgagtcccgtctaggccgcccctaaaaagactggcctcacaccgatcagaaatgagaacgacgagctgattcctactcgggtgcaaaacagctggacagcctgcattgactataggaggctgaaccacgttaccaaaaaggaccatcttcccctgccattcattgaccacatgcttgaacgcctgccacgtaaatccc

SEQ ID NO: 303022 - DNA, 501 bp, Glycine max
  unsure (1)..(501): unsure at all n locations
nnnnttttttnnnnnnnnnnnnnaaccagcaagacccagaagaaacacagcacgccacacagacaacaccccnnnnnnnnnnnnnntnnntntnnnnnngnnatgggcctctccggttncnnnnnggggttttttttttnnnnnnggagccnnnccaccccgcnncncccnnancccaaacctccaancccagcannaaacacanggcaccctnnaaggcaaagcnncctgagggcaacacacttatcagcaatgcactcaatctccgcatccccaacggttccaatcccacaaagagccaacctctccaaattcctgcaactggacgcaatcgccgctaggctcgaaaaagtgggaaaaacaccaatcaacacgagctcctgcaaataaaacagtgttaggcntcgcatgcaacccatcatcaccaaacccataaacccccacccatcaatgtgaaccttcctcaacaacccacacctatcagcaaccgacaaaactccc

SEQ ID NO: 303023 - DNA, 413 bp, Glycine max
  unsure (1)..(413): unsure at all n locations
nnnnaagnnnnnnnnttctactaacgatcagctncnccnnnnaangaaatnctccnccccccnaaccctcccccccccccccttaaaaaataaaaaccccccaaggataataaccccnccggcggggnnaaaaacaaccccnnnnnnnnnnnnnnnnnnnnaaaannnaaaaaaannaaaaaaaaannnaaaaaaaaaaccccaaaaaaaacaccaaaaaaacaaaaaaaacanacaaaaaaaacaaaaaaacaaaacaaaaacaaaaaaaaaaaaaaaaaacaaaaaacaaaacacacaaaaaaacaaaaaaaaacaaccaccaaaaaaaaaaaaaaaaaaaancaaaaaaaacncaaaaaaaaaaaacaaacacaaaaaaaaaaaacaaccaaaaaanaaaaaaaaaaaan

SEQ ID NO: 303024 - DNA, 191 bp, Glycine max
acaaaaaagaacaacaaaaacacaaaaaaaaaactcatcaaaaaaaaaaaacaaaagaaaattcacaacaaagaaaaaggcaaaccaaagaaaaacaaaaaaaaacaaaaacaaaaaaaaaaacacaaaacccaaaaacaaaaaaaaaaaagaagcaaaaaaaaaaaacgaaaaaaacacaaaaaaaaaac

SEQ ID NO: 303025 - DNA, 238 bp, Glycine max
  unsure (1)..(238): unsure at all n locations
gaaatcattaactctattagtcaaatattgtcacaaattgatcccttttgcgtgcatttagtcattatattatatacttaaaaattgttaagtaaaaacaaattattattctaaaaaatatacttttacgaaaagaaatatttgttaaatatttagacctgattaatccaacccaacccatttatgattgggttgcgttgggtatgaaaaaaattatacaaaccccactanggatggc

SEQ ID NO: 303026 - DNA, 267 bp, Glycine max
atgtttccttaataaagtctacaagtttcaacaatacatttatggattgaaagaagtgtctagaatttggagcattcattttaacaagataatttgaatggttaatcttgttagctatgaagaagaactttgtgagtaaaaaaaggttactgggagcattacatttatatgtagatgacatataaaataatacacaatattatgaaaaaagaattgactactaatatattatcaatgaaatatttaagagaaacaatatttaaaaat

SEQ ID NO: 303027 - DNA, 349 bp, Glycine max
agctttgagtaaattgaaatgacaagaactttctacacggatgtccggttgagtcccgtaatatatcgagatgctcaaaatttagatccgaagctctgagaaaattgaattgacaataactttatacacggatgtccggttgagtcctgtaatatatcgagacgctgtaaattgaaagcggaagctcgtaggaaattcaaacgacaataactttttactccgatgttcgattgaatcccgtaatatatccagacgctcaaaattgagactacaagctctgagcaaattgcaatgacaataactctatacaccgatgcccggttgagtcccgtaatatatcgagaccctc

SEQ ID NO: 303028 - DNA, 405 bp, Glycine max
agctttcgataaattcaaatggtcataacttttcactcgcatgtccgattcaggcgcataacttatcgagacgctcgaaattgaacaacggaagctctcgagaaattcaaatggccataacttttcactcgcatgtccgattcaggcgcataacttatcgagacgctcgaaatttaacaacagaagctctcgagaaattcaaatggtcataacttttcactcgcatatctaattcagcgcatagcatatcgagacgctagaaatttaacaacggaagctctcgagaaattcaaatggtcataacttttcactcgcatgtgcgattcaggcgcatagcgtatcgagacgctagaaatctaataacggaagctctcgagaaattcaaatggtcataacttttcactc

SEQ ID NO: 303029 - DNA, 442 bp, Glycine max
  unsure (1)..(442): unsure at all n locations
ntntggagtagaaacatgggacgaactcattttatttcttattggaagtcgtatctagtcaaggtctgagagaccatacaagtttcctaacgatttctaattatgtgggccattaagtctatcatatgctgacaatagccgagaagcccatgaatctcttcgggggcggagtaggtgtctgccatcgccttggccttggctaacaatcggggaagttcttgactcccgttcaaggtaagagcaaaccgatccatccacatggttgcctcttggtgtaaagagtcgatcacccttcctctagcctctttttccgcgtatacttgggcatattcgtccgcaatcctatgctcgtgggccgcggctagacctaactcttcttggtacttggcgatgatagctagcatgttggtctccgtctcgcataaacgctgagacaagcttc

SEQ ID NO: 303030 - DNA, 391 bp, Glycine max
agcttgtgaacttaatataaaaaaatagacagcttcagttttgaaacatgcaaattattattctctttttctatcataattttacatatatatttctttgttgtttttctccctttatttttgtcttcttattagcattgtgttgcgagtatgtttaacttgagggtaaatctaaacacgctcatgttaaaactttgagaaaacaaataaatttagttaagtcaatttgagtatttgtttttttgttaaaattatttttaatgtgctaaaataatgtttgttataccaatttttgttttttaaaatttttattttgaacaaaataactaacaggtttaatataaattcagctataaataatttttgtgtcatgcagaagagatgttttgat

SEQ ID NO: 303031 - DNA, 435 bp, Glycine max
ttctagacagatatgtaccagctgcttctgtaattaattttgcctaaattatgttttgaaggtccaatagcctaaaagaatggtagaacaatgatagtatcgaactcaagaaatctgtgaaaatccaaattgaataaaaagacaggcaaaacgagtattcatgtgtttgccatgaatcaaacataatgaggttccaacaatttttaatcaaattttaattttaattttaattatccttatgctagaaagtttaactttttttatttatttcatatacttgcacaaattttgggaaaacaagtgtaagaaactaagaacttaagtgaaacagtatcatgaacacttctaattgcttttaccagagatctcatagcatttacaaaatcaggtttttcttctaaaggatcaacagacagaacaagtcttcccagtgtg

SEQ ID NO: 303032 - DNA, 391 bp, Glycine max
agctttatgtaatgtggtaccatgtcagtgaaaaacctcggcgggcgcctaggagtacatgacaagacaagccacacaatagtaagtcaagtcactctcactaggtaatatcatagggagaccagtcagggtcacagtgttttgcgagaattttccaaccatatgagatcaacataggcttaaaggagcactcaaaccgtgtgacccccaaggcctacactccgaacagtccgtcagggcctctccctcctgattcacgtccaaccaagaaaatattttagcacacagactctatctatgaactgtacaaaacacatgacttctcaattgttctcaaaataaatctaactcgccgtcctttaacggtcttatcattaactcgtccgcctta

SEQ ID NO: 303033 - DNA, 435 bp, Glycine max
tgtgatatctttactatatatgtgtgtgtcttcgtttatctctacctgtttaaaaatgtgataattcactcctcatgtgttgtttatgtttggatcatgtgatgatcttaaaccttgtgtttgtgagagcaaatgactaggtgaattactttaagaaaccttgtgatggaggactctgagacacaatattttgataggatgtaacattggaacaagagtttttattttaattgcatgacgtatcaaacatgtcattttactttatttgataaacttgaacagtcttgttttaagtcataaatatttctaagaaattttatttggttacaagtgaagcgaatgtgaacattacccacgtggactgatttacgattttattgaataaaattgatttaattagatctcgcattttatatatgtctttctcatttatat

SEQ ID NO: 303034 - DNA, 306 bp, Glycine max
agcttcttttatcttgtgtcatgggcatattgagacatgcgtgcggtccaccccattgagcgactttccatgaatcaatttctctacatagaattgtcttcatatacaaagggcaacgaaaatctgcatttctattcacgcaacaaacgacatacttgtcccattttctttcaaccactttgaaactttcatgcaccttcataacatattgctcgactgcattcttgaccgcatctttactatcaaaatccatgtcaacatataattctctgccaacattaaaactggatcgcctttccaaaccac

SEQ ID NO: 303035 - DNA, 446 bp, Glycine max
  unsure (1)..(446): unsure at all n locations
tatacaatactcatgcttgaactcattagacaaaatctatatactagtnggggattcgttgggtttgtttctgctggtatgaccctagcttgtctgataaaaaatgaaccattagtttacacattatgagaatacattaatataccatacatcatattattaaagagtgtcctacaataccttaatagtgacaagttcaagcctttcacccacaatgggttagtaccctccacaacatctttcaaaaaaaaaaattcttccacaatctccaatattgttttgactagcagatgataatatcaatgatttcagacttaattangagttttattanggtaagccaaattacatttctcaaccatgatttgctctttagggattcgattgatatggctactacgtgtttttacaattaatgttcaatcttactaggatgcacaacacat

SEQ ID NO: 303036 - DNA, 362 bp, Glycine max
  unsure (1)..(362): unsure at all n locations
tttctttattttgggaagaaaacagggatgggggtaatgcatgaagatattgattttactatcaaacatttagtccttcgagatacgtcctgagagcttgaataaattacagcccaaaaatcaacccaagtgcgatgcattttgctctttagttaatcatccaatgtgtcaatatgatccacaattagtgggtaaagcttatacacaactcataccaacataaggaatgttatgcacattgacgaccagaggaataaaaagttgaagtcagagaacacaattccttttngtcctctatatcctttcacaacactacccgaaatggacatgacaacattagacattcctcaaaatcatattga

SEQ ID NO: 303037 - DNA, 414 bp, Glycine max
  unsure (1)..(414): unsure at all n locations
tgtcgttggcttttatttgacacggtgcgtagaattacttggtttgttgcactttcagtgtatcgagtctaataattaccagttgaacaaatcttatgtgtacacacttttaatataaaaaacaaataacaatcgtacaatatgattgtaattgtgacatttcaaaaacacaatagtgaatggatacttcacaccaacactatggtgaccaacaatatggtgacgtaaaaaaaatagtaaattttgagaaatatgtgtagtgtttatgaatatatgtgagaaggaactgttactatcaagtntcttaaaagttatccccatgttctaaaacttgcttgtttcgtgaagttaattacctccatatagtgaacatgacatgttaatttttcacatctgcaaatatcttagatgctt

SEQ ID NO: 303038 - DNA, 262 bp, Glycine max
ttctttttaattcgaattaaaacgttcaggacgtgctggtaatcgattagcacatatgtgtaatcgattatcacatgcaaattttgaattcacacctcaatagctgttgtaaatcactctcggctcctgggaatccattacatcctccggttatcgatcaccacacagtacacctcctgaacaagactttataacctaaatttcttcaccaaacctttcgctacttcaataggaacctccttcctatctgaatatactcttc

SEQ ID NO: 303039 - DNA, 293 bp, Glycine max
  unsure (1)..(293): unsure at all n locations
agtctatagtgggagagcgaactaatttcatatctataacacttcatgaagacctcattctattatagagccatacgcatgaaatatttattatgcaatcactaaagaagatagatgactattatcaacacactattaaacaaaaataatctttaaaacataatgtgacagccgttctcactttattttaagntaatcttcaacataacaaatacacaattgtagaactcaactaccgattcgtacccaactccaccttatactatataggattatacaaatccttaataaaa

SEQ ID NO: 303040 - DNA, 298 bp, Glycine max
tgcttatactaaattcgactacaactcggtacgctatttaagctaactctactcctacaacagggatatgaggatgaagcttagtttacagtcaccctaaacctatgagggctgtctaaattgagcctactccaacaagatggatctgaggacaaagcttgaattgattcaatctaactgcggatcgaggcttactaacttacgccacaacataaaacacaaaaacatgattgatcggtgtgctttccggtcaaccggatttcccttgaatacttttttataaagaacaaagcggaca

SEQ ID NO: 303041 - DNA, 387 bp, Glycine max
  unsure (1)..(387): unsure at all n locations
tggaattgcatttgggcacctattctgaatctcttatgttgcacctacatataagaaacagtcccactctcccaattttacaaaatcatattcatacatcattggggcatttcactgagcacttggcgagcgcatgttcggacataaattgcaagaggatggggacaatgtggcatgccccattgcttnagaatacagcatacgcctaaggccttctcattcaaatcctcaattcaagaaaacaagcataaaaacaaaccaaaactgccccacaaatataagcacattctctcaatttggagcaccaaaagatgaagaaaatataccaatgggaagctaaaaacatcaaggattgaatacttacttgtgggagtgaacaataacacc

SEQ ID NO: 303042 - DNA, 381 bp, Glycine max
ttcttgtgatatatcccactgatttttatttatgcgtttatagcaatatagcgtataccgaattacgttggatgtattgaaactttgaaattgacaaaatcatcaaaatactgataatataatcttataagaattatatatgtacgaaaattttcagcctttttttcttttaaattttataatcacagcgatatatcaataaatcttactgatctatgtattgtaattgagttacgtaatgaaaattttctcttcctttcttatgtaaccagtaaattgtgctctggtcacatgtcgtcattaattaatggcagttatacttattaatatttgaacacaatactattagatctataaaattatcattcttatcacatatat

SEQ ID NO: 303043 - DNA, 434 bp, Glycine max
  unsure (1)..(434): unsure at all n locations
taaggtacgatgaatttcgaggtgcaagtcattcattctcctccccaaacatactcatcccagtaactggtagaattgtaaaatatagaagcttccgaactccctgcactgtacctgcctctctgctccctagaaaacttgaacagcgtggtagcaccatgaactagtttcttcgaataggccttgttgtccttgaaaacaatggaagcagatgccaaggcagcagccatctcagctgcaagatcagaacaactatggcattcagtcacagggcggtcatagtccatgtcctctgggcgcatccagcaatagtggtcattcggactgtcaccaccggaagtatctccaagcccaacctgtcaaacaagcataaaaaaccatcattgagacacatcctactccgcaccacacaacanaattctagtccaccaacc

SEQ ID NO: 303044 - DNA, 539 bp, Glycine max
  unsure (1)..(539): unsure at all n locations
ccccaccccccccaccacactaccccgaccacaactctacacacacntcnnnnnnngggcggcggcgctgactcgtaaaccacggaatgcaaacgnacgngcggaaccctacacncaatccgccggcacgcaagcccctcattcaccatccgccgcgcccaccacaggcagcggacaacggccgaagcacacaacacccncacacctacaccgcaacgccggacacaaacgcgggcagccaacccgactggccaccaccaccaacgcgccaaagactccgcgctcaaccagccatcgccacacaccaccgccccccgacgcacacgagcatgcactaccaccacaatacaaacgtccgccacacaaacgaacacatttcacaagctcaccccgcacaacggtggcgtctcgcgaacgaaccgacacaccccccacccgatgacgcacggacacctacacccgacccacacagaatcaccgcaacaggccccccaacaccaacacggacaaagaacgagacggatcgccccgaacccacc

SEQ ID NO: 303045 - DNA, 432 bp, Glycine max
  unsure (1)..(432): unsure at all n locations
tgacctaagaaccagcttttcgggttatatcagggatcttattgcaatgaagaggaaatacagcaacaaaaagggcacaataatcagcatttgggaaagaatttgaatgctgagccagtcgtactagctgtccagtcccatgttggggaagaagatgactacgacatgcagacccactctcaccttatatcggggcagagttatcacagtattgggccagattgcaactttggcccaaacatcatgcaggaggggtgcaataagcaggaggcttattctgtagctctttcggacgagcatcaggatcactctcaaatagctgatgacacaaacaaatctttaggcccaacttcgaaactcaaggggtgtaataaggaggaattattagctgtagcccanaccanaaaaggaactccagacttgtactccaaa

SEQ ID NO: 303046 - DNA, 384 bp, Glycine max
agctttatatagactttagagcttcgatctgttgagagatctcaggtagtcgttgtctaatagctttggcgcttaagacgaggccgctactatgcagagagagagtgggaaccacaaacactttctacagcatatctttagagaagtacaatctgtcaatgttgtttagtgctcagagttgactttcaacgtacaaatcaaaagaaacgttaacaacataagacaaaaggaattaataatgtcaaggcaagacaatttaaatcttcccttttgcgcgttatgactgaacttatggatgttactttctgatgatcattcttagcactcgaggatcaagtgactatttcattgcttttgtactgcgagcctgaaaaaagatgatcg

SEQ ID NO: 303047 - DNA, 381 bp, Glycine max
tcagaaaacaatagaagataatgctacagcggccgcttccaatacagctagggaagcggaaccggtgctacagccctcaataaacttgggccgagatagaaacacgacggttttcggtcggaggtatagtcctcaagcctacccttatggtttgcctctggacttcactccccgtaccgctccagacgatttgagccaagcccctaccttcgaggggcaactccctccttatgtcaactatcctctgcaacaagatgatgaaggagatgcccatctaggccctctacttcccctcaaggatccggccccccatgaattgccccaaccgaacatagttcgccatgtcccgtctccacctgcacccattaaagaattcgttcc

SEQ ID NO: 303048 - DNA, 391 bp, Glycine max
  unsure (1)..(391): unsure at all n locations
agctttttctcacatcgttcgcgtctatgatatgcagtcgacaatgtttgaagtagagaagaccttcaattctataacgcaacgtggcagacaaaagtgggcagttaacttgaatggccattattatcaatgcggaaagtattctgcgcttcactatccatgttcacacattattgcagcttgtggttacatgagcatgaactactaccaatatataaatgttgtttacacaaatgaacacatcttanaagcttactccgcacaatggtggcctcttgggaatgaagcgacaattcctccttctgatgacgcatggacacttatccctgacccaactacaattcgtgcaaaagggtcggcaaaatcaacaaggataaagaatgagatggat

SEQ ID NO: 303049 - DNA, 453 bp, Glycine max
ctaagcttaaggaaatcttttcttcagccgaagatgaaatattgttagctaaactacaagaaaaaaaaataggtgatttgtgttttctttatgacaactacaaagaggacaacaagagacaataacataaccacatttgcttagattttcgtcagaagggtttttttgtgaagaattctctagactaagaaagatctaaatggagggattgatgctaactaggtatgctttgctaaagaatcctgactaggtttcaatctgatagcattatcggctttcttgatggataaaataccattttcagaaggtctccacactgaaatgtcagtcttaatgaaagatgcaaggctaatgctactaactaattctcttaaattagtatttttgagatacaaaatatcagggtggaccaatattgacccacagtaaaatcctgcacaaaagaaaagagca

SEQ ID NO: 303050 - DNA, 398 bp, Glycine max
  unsure (1)..(398): unsure at all n locations
agctttatacgttcaatttcgagcgtctcgataagttacgggactcaatcagacatccgagtaaaaagttattgtcgtttgaatttgcacagaggttcaacattcaatttcgagcgtctcgatatgttacggggctcaatcagacattcaagtaaaaatttaatgtcgtttgaattttctcagagattcaacattcaatttcgagcgtctcgatatgttacgggactcaatcagacatctgagaaaaacgttattgtcgtttgaattagctcagacgttcaacattcaatttcgagcgtctcgatatattacgggactcaatcacacatccgagaaacaagttatggtcgtttgcattggctcagagcttcaacattnaattttgagcgtctcgatat

SEQ ID NO: 303051 - DNA, 444 bp, Glycine max
  unsure (1)..(444): unsure at all n locations
ntgagccaactcaaacgacaataacgtttttctcggatttctgattgagtcccgtaacatatcgagacgctcgacattgaacgttgaagctctgagccaatagaaacgaccataacttttttctcagatgtctgattgagtcccgtaacatatcgagacgctcgaaattgaatgttgaatctctgagaaaattcaaacgacattaaatttttactcgaatgtctgattgagccccgtaacatatcgagacactcgaaattgaatgttgaacctctgagcaaattcaaacgacaataacttttttctcggatgtctgattgagtcccgtaacatatcgagacgctcgaaattgaacgttgaagctctgagccaatacaaacgaccataactntttactcggatgtctgattgaggctcgtaatatatctagacgctcgaaattga

SEQ ID NO: 303052 - DNA, 365 bp, Glycine max
agcttgtagtttattttttccttccatttatatccttactattttaatatacttttaccctctgctcttcaaattgttcatatgtaactattttttaattactcttttctttttattaatttttgggctatttatttcataatattataatatttactttaacaacactatttaattagtccttaattaaatatgtttttgcctacaaaacaagaatagaattcacataaaacagctatacaatatgttcattattttatatttaccaactatttcaataattctacaaaacgctcttaatttaataagcaagcttataaacttttagctcttagctggtagcttataaactttaaagcatctta

SEQ ID NO: 303053 - DNA, 438 bp, Glycine max
tctcaaggaggtgagcttagttatgagaggggtgtgtgtagctaagctctagcttctcaaggaagttttctcaaagaagcttctcaaggaagttttctcaagaaagcttctcaaggaagctacctagtctataaatagaagcatgtgtaacacttgttgtaactttgatgaatgaaagtcttatgagacacacttcaaagttccacttctctccctcttttattcctttaatttaatgatacccccttctttctttcttttcctccattaaagcatcctcttcaagcttcttatccaaggcacattcttggcggtgaagctccttcttccatggcttattccatagtggatggtgtagaagcaagcttcattgcttcataatgatgaatcaagattgattcaaggtgttttgatgataacaaagatgatgacaaaaat

SEQ ID NO: 303054 - DNA, 342 bp, Glycine max
agctttctttggtctggaaaacatgaccatatgatctgaatcctttatcactttcacctcagcatatggaccagtgctttcaactacccacctctgaaagtcctctgtgtgcaaattatctttttcactgatgatgggaggtcaaggcctcaccagacagaaagcaagtgtcaattccttcacagtacgtaatcgaacttgacttcattaatgacgaaattacattctttttatcatggggaacattacatagcacatacaaaagataaaaagctcactaaaaataaatcaagctcatgtcaataaactaaaaaataatcaatcaactgcttatatatgatc

SEQ ID NO: 303055 - DNA, 430 bp, Glycine max
ctgttagcacaatagcacctcctttgatgcatgatgatattttcacagtgataaatatattgtctccggttgtaaaaaaaaggagggatttttttcatcaattttaattggtagcaataagtaataaagaatttaaatttccccaccttgtggctgtggactgtggtgacaagtttggtgtttaattttaatttcttcggctataaattttgaactgataagtgatatggttatatccggaacatgaacactggcaacggcataaacaaagagatttgctaaactcaggtttgtgcttgattgaattttgctatacgctttccttctgagactatgttactaagagtaacgactaacgtgacccaattaagaatagaagaagggtatgaagctattgattttcaactcgatctcctaattaacaagacct

SEQ ID NO: 303056 - DNA, 271 bp, Glycine max
ctcttagcgagtatggggggctgagcagggcaccagcatgctcaccgagacacacgaatctggaacagaatctgccttgcaagcacgcgctcaccgcgtggccgctcgctaagcgagtcatccgtcatcttccaagctaaccgcgagactggcgtagagtcacacgtcactaatgcgcgctaaccctcacatcggtgctcaacgagaggcccccgacaggatttccatataacacctgacatcaagaattggcagacgtgcggacccacac

SEQ ID NO: 303057 - DNA, 435 bp, Glycine max
gactgtatattgatttctttagtatgttctctttgtgtccatttccttcaactgagaaccccattggttggtccatacaaacattcttctctaaatcttcattcagaaagggggttttcacatttatttgatgtagctccaagtcataacgggctactaatgccatgataatcctgaaagaatcctttcgagaccagtaaaatgtctctctataatgaatgtcatatttctgagtaaattccttagcaacaagtctagccttgtaacgttcaaggctgccatgagagtcacgtttagtcttgaagacccacttacaaccaactctcttacaaccccttggtaattctacaaggttgcaaacaccattatgttccatggaatctatctcttctctcatggcattcaaccacttctcagagctatcacaacttacac

SEQ ID NO: 303058 - DNA, 371 bp, Glycine max
ttttttatagtttatgccctttgctttttgtcgcgctgcttccgtgtttcgaaattcatcataattgtgatcaagtttctcatcaggaatctgttttagttcgtctctctcttgtggatgttgtcgctcgcgcaccaaattactatcattgcctaaaacgtgcccaaaaaattgttgtaaactagtcgtttcacacattgactacgagggttttgcacgtttctttatctgggtttgctgcggcgcttgttgcattctggctcttgtatatttctttcttaaccttttctgcaatccctgggattataccatcgtattttaatatataaatatacaaaaacatgtcacataacttcgaactggctcccact

SEQ ID NO: 303059 - DNA, 436 bp, Glycine max
tatggaattggcatgatgtgtcggtgctggaacttattatattcatcatagagcaagtgaacaatttgatatgaaaaatgaattggaagacacaagtttcaaagtttggagttataaagctaatttgatttgatggttaaaagataaaaaaaaatggtggattcaaatctctctcactagtgaaaatcaacaaattaacaactaatattaacctttaaaaaaaaaaccaatgttccgagttttacttgggattgacttgattaaaaggtgggacgtccaattcagatgataacctgcctaaaatttttaatttatatgtcaaaagatctaattagagggataggatagggattaccgagtgatgacagattatctttatgcagattttcgaagtatctgcaatttatatataatgaagaattttcttgggatatta

SEQ ID NO: 303060 - DNA, 381 bp, Glycine max
ttctttcaagaggattggcaaaggggatcttatccaaggcctttatgtcctagacctcaacgacactcatgattgaaaatttactttttctgctatcaattcacatgcacattccactctttgtaacaatgctcatatttggcattctagatccggtcatctatcaaacaaactttccaatcatttgaataatacaattggctcacacttctcccctaatttctcttcttctaattgttctgtttgtccacttgctaaacttacaagattattttttcctaactctaatcatttatctgatctaccttctgacttacttcactgtgatatatggggtccctatgcccaccctacatactgacggaacgagattcttcctta

SEQ ID NO: 303061 - DNA, 418 bp, Glycine max
taataataaaaggtaaaatttgcattttaaaaatttattatcaaaatagtcaaattaatttgttggatgtaaaatataccaaaaaataacaagttaaaggttaaaagtatgattaagcctgatttaaatatgtacacatttcaattccaagggttgtgattgttttttcaaaaaaattcacaaaaccatataattgaaacaaaatcttgaaattgggtttgggacagttttcccttttttcataggttcaaacttttgggcaattgaatactatatctcctatttttttttaaaaaaagtttcaacctatcccttttatcttctttctcttttttccttcttcctttttttcttttttgtagtcaacctgctctggttcttcttttcttgctgtagcgaaagtctatactcctttttt

SEQ ID NO: 303062 - DNA, 338 bp, Glycine max
  unsure (1)..(338): unsure at all n locations
tgcttttctttatatgaataagaacaccgatcggactgagctgctcacgtaccgcttctcaagaaccatctggcccacaaagcacggactttttgcaagaagcacaacctcctaagatctagttagcgaagaaccgcgtacctgtgcacgccaattacaagactattgcaagtacgccatatacatcatccactatttactgatcatcgatcatncattgtgaagttacatgatcacgacaccacctaccctcttcctctacacaaatggatgccagctcacactacgatggttgctaatcgggctcgcctcttttactacgtcgcatgctgccacaa

SEQ ID NO: 303063 - DNA, 424 bp, Glycine max
  unsure (1)..(424): unsure at all n locations
ccgcttgagttttgattggcagaagaagaacagacgaatatcttgttaagggataattcatacgaaaatattgctaattatcagcataactgaaattgtcctatgcagatctgatcatcatgctggtgctttctcatctattggtttcgtcatctagcctattatttttatttattctgtggcgattatcaaattatatatcttctaacttctaaacagtcatgatggattctacatattgctaaanttatgttgccatgaacgtcttcaaaaggccaaaataatctctcttcctctgatgtaataaaaatccccattcttctctccctcaactctaagctctcattctctgtcctacaacaaatttttctatcttgttcaacatactgtatttcattctgacggatgcggatttgcctggaac

SEQ ID NO: 303064 - DNA, 356 bp, Glycine max
tgctttcgatacaagtgattgcgaaaaaaccgcgtcatcccgcttgatattttccaagtagcccttgaaaaattagaaaaggtggagaagattaggcattcggcgccttcaaacctcacatgttcacgtcctaatctctttgtctgcttttccatttgcttcatatttcaatattacgtcagtctcatcttttggtctgccatgtgttccgtaaaaaataaaaaagaataagacaaatgagaaaaaaaataattatttgaaaaaagttgatgcgcggcattatttttattttattttctgagtaattaaattgcatgatctctctctacatcgtatcttgggcgacccaatgggag

SEQ ID NO: 303065 - DNA, 442 bp, Glycine max
ctaagcttgaccttatagtaaacaagtcaagctgagttgttcttttataggtctacaagctgcttggccctaaatttttcaactgcatgtgatcctaaacaatataatttattgtcaaataaatcattaaacattataatttaatgataaaatgatctcacaaatttaatggcaagactaatttattgtagttttacatattcatgaactaaatttgtctttctcattattttttaaagatcaatttgttttatgagatgaatttaactattcttcctttaaaagaatgagagaaatctttttggatgaaaccaaataccactttatggttcccacgtattctcttcccatccatcatcattcttatatcactctcacacgaacagaacctgccttagctaaacgggttcaatatcacccacactctctctctttgtcaaca

SEQ ID NO: 303066 - DNA, 318 bp, Glycine max
tagcttgttggagcacgatgggagctgatatttgtgaaggcattcaggaatttcatggcagcgcatcattgcctaaaggtatcacttcatcatttactactcttatccctaaatttgagcaatcgtaaagcttgtcggagtatcaccctattttactcataggtggtcttcataggatcatttcgaagactctggcccatacaatgaacgcagtattacctactattatatctccgcaacaaatagcctttttacccggaaggaaaatccatgatggtgcggctgttatcaacgagttggtggattcgcgaaaaacga

SEQ ID NO: 303067 - DNA, 432 bp, Glycine max
  unsure (1)..(432): unsure at all n locations
tgagctgactctatcttggatcatttttattatgggttatattggcaacttggcataataatatggatggaattatgttctgggtgatggccatgccaaatgtttgcccaccttttatccgtaaaattttgttatcttttattctatcgtatgagtacatggaaatttatagaagttcgttggttcagtccttttattaaattttattttgctactcttgaacaaaatatatgtcattatcactttggtacaagatagccaaaagatcctaccttgaattggattggaaaggcagagggaactcttaagttgtgtaataatatggacagtatgttctttcctaaaatataaaaatatatccatacatattgttcgtgcataactgcatataacataaataagaataatagctnttanatcgttactaacatt

SEQ ID NO: 303068 - DNA, 358 bp, Glycine max
agcttattattgttacggtttcatttgtaatggctggctaaacacctttgttggggatttctaatgaacaactgatgtaattattttcatatctaattgatcttgtttcttgtgttcaatgcttcttcagtgcttaagttttgtatgctcttggtctgatcaaccatttgtgtgcctagttacgtgattttaacattgcgaaatgtattgtctccttacaacttgaatgaagcagaattgaagcttagtcttacaagacggatctgcggattaagtttttgttttaagtatgttgctacaactaatgctgttgggccaagtctaaaccaacaagacggatctaacgacacagcttacg

SEQ ID NO: 303069 - DNA, 415 bp, Glycine max
tcaaggatatcaaattcatcctgactaacaataaattatgttttattgttagtaaattataaattttggctaataaagaaaatgaaagatgaaaactgaaatacctgaatatcctcctatatcaaatccttctgagtagcagggacttccttccaagtctcgtatgtcatgtcgacctatcaccagcgataatcccaaaatatgtacttgatttcttcttgtggggaccttcggccttcccgatcgcaggatcgacgtggaccaccgatctctctgccccaggtggtctagtggccaacgattgtagtcgtgtggctttgcgtgtctgcttcaaggtagacagagattgtgatgctactgcaagaggagaacgacgaagaggaggaggcgacgtatgtggagtagccatggacct

SEQ ID NO: 303070 - DNA, 397 bp, Glycine max
agctttagccttaggttgttccatgttgctgctccccttatctttaacagtaacaagcacatttccattcacaggtttagcgacatcaacatcatcacttgagccctcactttcaatgtttccattatccagtaatatcatgcctcttttatttggacattgagaagcaatatgaccaactccttgatacctgaaacatttgatatcatgggatctagaagatgaattaatttccattttacctttaggtgcagcaaatgaatttttggacttagcttcatcttttgactttgtcatagattttttgttttgccaatttgaccttcatgaataagtggaatcaaatttggaagtactcttagctctcaattgcctctccacttgaatagatttatgc

SEQ ID NO: 303071 - DNA, 443 bp, Glycine max
  unsure (1)..(443): unsure at all n locations
gtgcttgagcccactctgactcttctaggcctgactccgtcattatcctctgagaaggaacttctacctcaaatgggagtactgcctccatcccataaaccaaggaatacggtgttgccccagtagaagttcgcaccgaagttctgtacccgtgtagggcgaaaggcagcatctcgtgccaatctttgtatgacaccgtcatcttctgaacaatcttcttgatattcttattcgcagcctctacagccccattcatctttgaccgataaggggtagagttatgatgctggatcttgaagtcttcgcacatctcctgcattatcttattgttcagattggtgccattgtcagtaatgatcttcctgnggagtccgtatcgacaaatcagctccttctttatgaatctaactaccacattctttgtgacattagtataagaagcg

SEQ ID NO: 303072 - DNA, 392 bp, Glycine max
  unsure (1)..(392): unsure at all n locations
agcttgtagctgaatactgttccagctgcagcaggaactctttataaagacattttaggactttgtcctcatcctaaggtcctccacccctccctcttagtctttttgcagtatgcaagcttacctttgtagttgcttgtagccgtatatctttagttgagacaaaagaaaaagaatgtttataaagaaaatgaatattcaataagctttaatctgaaggatatagccaaatgggcagaaattgattattcacagcatactctagctagcatgatttttaaatgggtatgattcataatcattcaaacacaatgtagatagaaccaacaaaagtgtttcacgatctgtgaattntgtatacagccaacaacagctgctagaaatctctgtct

SEQ ID NO: 303073 - DNA, 443 bp, Glycine max
tgacttgtccaatataatagattaacaggaagcatcccattggaaattggcaggcttgggagaattgatcaattttctcaatttatcatttaacaatttggaaggaaagattccatctgatggtatctttactttatttcagtttcaaacttgtcattcttagggaatccacaactctggggaacaattgcaggcatatccttgtgctatcaaaggaatggtggtgttagtgttaactcgttgacaagtgtatcaaatcgtcacaagtagtaaagttctcggaagtccgagtgtcgaattcacagggactttgtttgtacttagattaatgcaaaccccaatttaaaagcaagaatttaaagataaaattagaagataaaagaaaagataagatatttaaagataaagttagaagataaaagaaaagataaatgatagaagat

SEQ ID NO: 303074 - DNA, 386 bp, Glycine max
agctttatcttcaacccaagaaggaagtgataaggaggattcaattgaaatagacgaagatgatgatctcaatctatttgtaaaaagattcaaccaatctcgaagagtcagaggaaattaaagaagatcaaattttaaatcaaagaaaagggcagaagattcatcctctattccaaaatgttatgaatgtaatcaacctggacatttgagggttgattgcccaatcttcaagaaaagaataaagaaatctgaaaagaaagtctttaatgaaaacaagactaagaaggcctatattacatgggatgacaatgatatggactcatctgaagattctgaacacgaagttgtaaacctgagtctgatggccaagaattatgacagcgatg

SEQ ID NO: 303075 - DNA, 439 bp, Glycine max
  unsure (1)..(439): unsure at all n locations
ntgatttcaaattagtattatcttataatgatcatatatgtatccaatcaaatttcttttttttttcaagtacatacatatatgcctacatattaacgtgtatagttatcttaatatattattataggattagttattatatacatacatatatatatatatatatatatatatatatatatatatatatatatatatatatatatatatatatacatatatatgttttttattatacatgtatattgcatatatatattataaatagatattttggacatcatatgtcattatagcatgattttgaaaatgcttattgtcatggaattggaaacattatggtttgatcgttatatatgtgtatatgtatgttgcgtcctatgaacattgttatgaatgttatgaagatgtataaatgaacatgacgtggattaagtgc

SEQ ID NO: 303076 - DNA, 99 bp, Glycine max
agctttgttttgaatatcttagtaccctgcacgcataggttcctcccatctttggtctccatcgtcgaaagcataccgctacttcgaattttagccgca

SEQ ID NO: 303077 - DNA, 376 bp, Glycine max
  unsure (1)..(376): unsure at all n locations
ggtcattagaaccaatgaactcactgacaatctccttggacagaaccttctctcgaatgaaatgacaatccatctctatatgcttagtcctttcatgaaagactgggttcgaggcaatatgaagagcatctcgattattacaatacaacttcatttgcaactcttcacaaaacctcaattcttgcacaaattgtctaatccacatgagttcacaagtaactatacccatcgatcgatattcagcttctgcactaaaccgacctacaaccgtctgtttcttgcttctccaagaaataagatctcctccaatgaagacacaatagcctgatgcaaacctnctatccatgggacagccagctcaatcagcatcacaata

SEQ ID NO: 303078 - DNA, 432 bp, Glycine max
agctcgtccgggatccttgagtcacctgaggcatgcaagctttaactaatgtcttcacaaataatcatcacacagcagaagactaacaaaaccacccatcatatctcccaaaaccccatacccacgaaatttaagacagaaagaagtccacccaaacctgaattttcgaagtcccactcgtagccacgcacttcacgactccgaaaatgctctcctttcgcgatttggagcagaaatgatggccaaaggttgaagctttgcttggagcttcaatggagaatggaggagaaggaaaaagccacgtgaggaagagggagagagagagctgttctgaaattgggctgagtgaagagagagacagagttgctttttttttgggtcttaataaaagggttttctcttttctattattttattcaagctctgcacatg

SEQ ID NO: 303079 - DNA, 443 bp, Glycine max
agatgttaggtgatgcaatcctaccccgcaagggcattggatagaaaacttcaagtagattgggccaaagatgcaagagaaggccctagggttcttatgagccttatggtagatttcgggcccatgggctaagtatgagcccacttatctttgtaaatattagattaaggtttcattatttttgggccttgtatttagggctccataatgtaggtagggtaccctagaaatataggatttttcagcccttgtatttaagggcacctagactagtttttgtattacgggtagttttgtaatttcacatgtactaagtggatatttgatgtgtgtggttggaaataaatttaattgaattggtagaagcccaatccaattaaattttagagggggaggtgagcatttgcttactacaccccattgccacatcatatagttacact

SEQ ID NO: 303080 - DNA, 391 bp, Glycine max
tttcttgccacccaggtcacccaggctagctcagctcgcccaggcgagctatgctgcttcaccgccttctggagaacttcctggaaggcccaaatcggtctagttgctatttgcacccccttttttactaaatacaccccttgcctttttttgctgattctttttccgtaacgctacggaaacttacgaattacgtaacgatacttgtttcccttccttaatgttaacgaaccttacagattacgtaatcatccctctttttgccttccagaatgttacagaactttacggattgtgcactaacactctcttctaattttcccgattccacggaactctacggatcgtgctacaatgctctcttttgacttccgacatgtctccgaacttc

SEQ ID NO: 303081 - DNA, 438 bp, Glycine max
gtgaacagtgttgtttttcaccttctcgttaagcttatctgttggcttagcgagcgtccgttaagcacaacactcataggctaagcgcgaggaagactctggaagaagatgagttgtacaggtttgctaagtgcaccgcttcatctcactaagcgcaccgcttcagttcatccactaagcgagaaaggcacgcgctaagccgaaattcactaatgtgcgctaagcagtccataagaaatacttcccagagtccaagactgcggaagggaaagatgcaatctctttatttcatcagtttcctgatgaatctttgagtgaagcattggagaggttcagaggcttgttgagaagaactctcactcatgggttttccaagccaatccaattgaatatgtttatagatgggctgagacgacaaaccaagcaactgttagatgc

SEQ ID NO: 303082 - DNA, 387 bp, Glycine max
  unsure (1)..(387): unsure at all n locations
tttcttccttgtgatgattcctatagaagctagagcttatctacacacacctctctaatagctaagctcacctccttgagatgagaagctagagcttagctacacaccccctataatagctaagttcaccctcatgccaaaatacatgaaaataaaaaaagtctctactacaaagactactcaaaatgccctgaaatacaaggctaaaaccctatactattanaatggtcaaaatacaaggcccaaaagaaggaaaaacctattctaatatttacaaagaagagtggacccaaccttggcccatgagctcagaaatctaccctgaggttcatgagaaccccagggccttctttagcagctctagcccaatcctctcggagtcttcta

SEQ ID NO: 303083 - DNA, 437 bp, Glycine max
  unsure (1)..(437): unsure at all n locations
tctagccaaatggaattaccttgaattaattcctttgatagcccttttgagccttgtttccctttccttgttttgaagctcactacaagccttaaatgaagaaccatgatatcaccatatccttaaggaattttggagctttggaattgttttgggaataagtgtggggggtttttgtttcattggataacttgttttgttggctatgcttcatgatgtattttgggccatacttgatgtacattgtatattggttaaatgttggacatgcaataaagttgagtgaataagatcttaaatggcacaagaatgatgaaactcttggttctactctntatgtttaaattttatctttacttctttttattttcttattntttttcttaatatgcacttattccccattgctcctctattcctttgcgatttagccactt

SEQ ID NO: 303084 - DNA, 385 bp, Glycine max
ttctttcattttgacattaaggttctctttttgaattaagcaacattgaaaggtagcagtcttgacgttgaaatgtactccggtttgcgcaatttatattcacaatctcaaaatatcttagttagattttaaaatggggcaggattacattaaatctttcaccatattttatattctctaatcttttgatttttgttattgttctcttttctaaccatctgtcataacgattgacagatcttgaaaactcttttattttctgatcttcggtcaatactcaatcctgcttcctctcttgctacgctgacgccaacaaacctgttcctatggatgatcacaacatactgagtataaacagcggcagcatccatggttctcctggtcc

SEQ ID NO: 303085 - DNA, 416 bp, Glycine max
tgttgaatctaggatttgtgtcatggaattcatatgctgtcattccataagcattgctgaatggatgcccaccctccttaactgaatctgtcaagtggaacctacaagaatgcagtcctttaaactctctatctaagacttcactaatcactaaccactaattatttataaaaaaaaaagttacgttgcaagtatatttgatttatgttgctggcaatctttactttatagtgacatataaaattataaatatcattacaaattctcatttttaggtgacaatctttcctttataggcaacattatacgaaagaacatatatgagaaaaggctggtatagaaccaattaacgaaaaaatgacaaaatcggttaaggtagtaattttgatacgtacacaagagatgcgactgaaaaa

SEQ ID NO: 303086 - DNA, 380 bp, Glycine max
atgatgaattctgacagactcagggcgtgtcgatcctaactacgatgatgagctccggctcgagatactgactcccctaccgagtcaagatggcctcacgatttacgacagatgtgcacctccgatcgatgaatcatgaataatgctctcgatgatccacgaatcccgacacgaatctttcaacgatcatactcttaactctttcacacaatttagtcccatacgaacgcttcgcaggccctttactcaccgagtctctactttctactaatccatcaccacctcattgtaatcgactaccaccagccaagattgttctacaacgctttcccttatttacaccgctcctctgattcaaacggcgtaccgactccaccgcc

SEQ ID NO: 303087 - DNA, 352 bp, Glycine max
  unsure (1)..(352): unsure at all n locations
atatagcgataaattagtacgaaactcttttcattnttttgtatcagatatacagtgtgcattagctcatctcatcataatggattcacgactcaaaagatttactgtaggtctagatcatcaagatcctaggttaattgtcaaccagcatcctttctgactgccttactgtgctaattttctgatatattagtatctttctttcgggcctgtctttctttgatcaagccaaaagcatattttaatgacagtgaaaattcacattatggagttatcttgctcttgacctacactacatacctgattctttacaaaaagtatacatgcctcaaaatattgataatctgtatat

SEQ ID NO: 303088 - DNA, 322 bp, Glycine max
  unsure (1)..(322): unsure at all n locations
ttcttgtatatgttgagcaatagtcatcaccgcgattgaaatgcccaaaatttttcccaattcacaccattgtcacttttattcaacatatgatggctatgatctgctatatgttttagatcaataaggcggcttgacacaaaactgttaacaaaaaccccaccgttggtaatggtcaagatactagccaaaaagtgggcaatatgaaactctaacacctgtcanttcatctttttggcctccttatgactggagggttccgcagacctattcttgtgatcacagctttgtcttttgccttctgcactgtctctctcctttg

SEQ ID NO: 303089 - DNA, 410 bp, Glycine max
tcacatgcttcactctctcttgtgtgctgcggctttggattatggacactatcttttatacttggtatcaagtattggattgcgtactttcatacgatgaatctaggagaggtgtcctttaagagacatcgatacatgggatctgctttatttttctcttagcagagtgttagttacatgcatgctgtggttcatatgttacacagagtatttcttgttctacaacttgtgagggtcatccattctatcacctggaggaataagtactggactccagatgaagaagggaagcagaggtacacattatttctgcaataattcatagatgaacctgaagtcaaatattacatcttgttctgaggatgaaaggaacatacttgacttctgaatcagaattgagtacaggttat

SEQ ID NO: 303090 - DNA, 363 bp, Glycine max
agcttctaccatgccaaaacgaaggagacttagtatggatttaagaaaacaaagctagtaacagtgctctgggtcaaacacccacattactacatgaaagagctaagagtatttcgggttttacaaaggaacgtaatttggaaattccgaccacgccaatgtgaccggggttcagtgtaggttacaaaaataacatgtatttcatgaaaggataacgtttacaaagtctctttctctaaggtttttcaaaggaagcataagacatgcaatggcggctgcaaagttagaaaagatgcaaagagaagatggaactaacaagaaacaagcatagaaccatggttacctcgaaagaaaacaaaagat

SEQ ID NO: 303091 - DNA, 423 bp, Glycine max
  unsure (1)..(423): unsure at all n locations
tattgtgtggtgttagcagcgcataagatgttgagtgctacagatattctagaaattgatacatttagaaaagttggtataaggccttctcaaatgatgggtgatggaagcttgcttgtgggacttctatggaggttggatctttgagcttcaatgaagtcctttaatggtgatttttcaccatggagatgcagcgaaagacaaaggagaagaggtgagaggaggcgtcatccactaaggaataagccatggaagaaggagcttcaccaccaagatgagccttggataagaagcttggagaggatgcttcaatggaggaaaagaaagagggggagaaagagagagggggagcacaaaattgaagaaaaacagggagagaagtgaactttgattgtgtctacaagactctattcatanacttac

SEQ ID NO: 303092 - DNA, 341 bp, Glycine max
  unsure (1)..(341): unsure at all n locations
agctttatcacttttcacacagaggtcagattcgggcacataatatgtcgagatgctcggaattgaaccacggaagctctcgagtaattcaaatggtcataacttttcacacagatgtccgattcgggcgcataatatgtcgagtagctcgaaattgaacaacggaagctgtcgagaaattcaaatggtcataatttttcacacggaggtcacattcnggcacataatatgttgagatgctcggaattgaaccacgaaagctctcgagaaattcaaatggtcataacttttcacacggacgtccgattcacgcgtatcacatatacagacgctcgaaattg

SEQ ID NO: 303093 - DNA, 426 bp, Glycine max
  unsure (1)..(426): unsure at all n locations
acagcttgaatcggacctcagtgtcaaaagttatgaccatttgtatttctcgagagcttccgtggttcaatgtcgagcatctcgacatattatgtgcccgaatctgactttcgtgtgaaaagttatgaccatttgaatttctcgagagcttccgatgtttaatttcgagcatctcaatatattgtaagcctgaatcggagctcagtgtgaaaagttatgaccatttgtatttgtcgaatgcttccttggttcaattccgagcatctcgacatattatgtccccgaatctaaccttcgtgtgaaaagttatgaccattcgaatttctcgagagcttccgttgttcagtttcgagcctctcgatatattatgcgcncgaatcggacatccgtgtgaaaagttatgaccatttgaatntctcgagagct

SEQ ID NO: 303094 - DNA, 395 bp, Glycine max
  unsure (1)..(395): unsure at all n locations
agctttattttgcgggttcgggagacaaaggtcaagcgttcgcgatatgcgaggatgatattccgagtactttggatttggtacgaccatgctctcctgatttccagctgggaaattggcgagtggaggaacgccccggcatttacgcaacaagcataatgtaaacctttacggttttttaaagctctatagttgggcctacgctttanagttttcattttgttaaggctttgtgtcctttgtgtttgaatttataatacgaggatctttcttcatctgttcctggtctctacccattctcattcatttgcatgtttacttctttttctaaaacggcagattcgatgacgagtcccccgaaggtactaatacctgggacccgtctatcaacttcg

SEQ ID NO: 303095 - DNA, 442 bp, Glycine max
  unsure (1)..(442): unsure at all n locations
tgatttgtgagttgattntagctttagtttcacttggttatttctcaactcattaaaagagaattttcaaagtaaatgtccggttgagacttgcccttttgatgattaaccaaggttacgacataaacaatcggttgaattttattttgaaagtgattaaatgagattacaatgcaaacgatcggtcaaaattcattttaaaattgattaagtgagattacggcttaaacgatcagtcaaaactcacttaaaacgaagaaaaagaatactgaaagtagacgagacgaacatgaaaacatacgaagcaagaatcgacgcctaaggatgcatagaatgaatccaaagcttcgaaatcaaaaactaaccagttgaagattgacgaacgatgaagaacagcaaagaatattcacggaattggtcacggaagcgttacagaagcgcc

SEQ ID NO: 303096 - DNA, 394 bp, Glycine max
  unsure (1)..(394): unsure at all n locations
agctttattaacttgttgtaatcaattacgaaggacctataatcaattaaaatagagagttttttcctcttgaagaaacttttctaacttagaactttttttcacactaaccatgatgatgaatgatgtaaccaatacaaatgccactcaagggagttaggcatgtaaaactcaaaacatcttcaaaaattcttcaagcttttccttgaaaggttgttcaccatattgctcatgttgctcatgttgttccccttatctctaactatctccccctttttggctctgatgatgccaaacttacatatgacgttgagtgcatttggagggtttgagtcttgagattggagacttgatccttaatcttatcctgacnaattcttaacacttacgaaga

SEQ ID NO: 303097 - DNA, 420 bp, Glycine max
gtctaaattgacgctttagatcatttttattatgctttgctgagcaacatcttcaaaattgtgattaggacatttcctcagcaatgatttgaattactcctatacttcacaaaagggttcttttgatcctttcctgaatgtagaaatatctgactttacattgatatacctagatggagggaaaaatctatcaagaacttttcttccactatgctccagcttgtcaaactttgatttggatgagattgtagccatgctttggctttccctgttaaagacaatggcaataatctaaggtacacaacctcctcttcacctttaggaatgcccattgtgccatattgttcatagaaagtagatagatgagtatatggatcctcattaccagcacttgcaaactgatgtgcactgatcaaactt

SEQ ID NO: 303098 - DNA, 110 bp, Glycine max
  unsure (1)..(110): unsure at all n locations
aaaaaacatttaaaaaaaaaaaaaggggaggcgaaaacaacccccccaaaacaaaaaaaaanacaacaaaaaaaagacaaaaaaagacaaaaaacaagaccgcaacaaac

SEQ ID NO: 303099 - DNA, 532 bp, Glycine max
  unsure (1)..(532): unsure at all n locations
accacgccacgccacctcttccccgtctcttttcgtcctcctccttctctcttantcactcatcaccntcgcggcgccgccnnctgagccttgatacattgganatcnnaggggtaccagggatcctatcgagccacctacacgcatgcagcctatcgtcattttttagtaagagggactaagcgacctgaagtttattgtccacctgacactcagcccgcaaactgatagacgactcactttgcgagcctgatacgcgctaattgtgtgcttgccgaacatatgtctgctcagattcccctttactcgataatgccgctggtgatgggcttaaccggcgatgcgcaccaatcccattgcgccaccttaccgtgatgagtcctttgtcacaacttcaaaaaccttctatctactcactctacacaacattaacataattccatccgaaaggctctactgttacagatcgacccacgaatttatctccacgtacaccaaaacatcattgcagactattacatttgaaacatct

SEQ ID NO: 303100 - DNA, 431 bp, Glycine max
  unsure (1)..(431): unsure at all n locations
tcanaccacagcaacacacaatctatgtatccaaaacctctcattttaatggattatcaaggtttgagaagtgaaattgagaatggggtaaatttggagtaaaacctcacctcacacaagtctataacatcaatttaaacttgctcaactggatttacacctaaaatttcaccgaatcaaaatttgactcctcaacacccaattttaccctagaaatggctctttgatcactttggccatttgtttttctctcttgcacagcccaaactttctcataagtcctaaatgacatttcaaactaggattaactctgtntaacctccaaataccactaaatgcagatttggacttccaactttcaaagtctcactctatattcactcacaacaccatactctcaccttctaaccctaggttaactctacccttca

SEQ ID NO: 303101 - DNA, 397 bp, Glycine max
tttcttattgagtaaaataaagcccaaagagcaggaataattaaggaaatcagagctaattgagaaaagcaagctaattgaggaaagaatggctaattgaggaaagcatggctaattaaggaaataagattaattaaggaaagcaaagttaataaaggaaagaagacttattaaggaaagtagaataattaaggaaaccataattaattaaggaaagtaaaggcagacttggtgtaaaaagctcactaatctgcacctataaaagaaaaagagaaaagaaggagaagacacatagaaattccaagagaatataattcctcatagaacgaaaaggctagaagaaggagaagcaaacaataggagtcattccttccctctatctcctttcttatctttt

SEQ ID NO: 303102 - DNA, 433 bp, Glycine max
tggcagatagtttagatagtactcgacgaaggatcactgctttgtttgcaactgaataagaataattaaacaaaagaatgagaagtaagacaatggctaaaatacataacactaggcctgtaaacaataaaatttatgatataaaagtacatgttactcttgcagatcaaaatttagattaaatcctccacaccagtcttagtctatacatgatggatattaattagttagtgaggtaagttggtttaacaaataaggcatgttgcctattaatcttgtcgtttgtgagagaactggggcctttgggcattgggaagtccaaacactcgaagttctacaagtttaaatctattattctttctgataagataccatgtttctaccaatatgctttagcaacacagacattcatatacatggaccaccataacac

SEQ ID NO: 303103 - DNA, 52 bp, Glycine max
  unsure (1)..(52): unsure at all n locations
cccccccacaacccccacactgacaacagcaangacaccaaccgcacaataa

SEQ ID NO: 303104 - DNA, 393 bp, Glycine max
  unsure (1)..(393): unsure at all n locations
tttctttcaacaagagtcttcacaaataaccatcatgaagcagaaaactaacagaactacccatcatatctnccaaaatcccatacccacgaaatttaagagagaaagaagtccacccaaacctgaaatttcgaagtcccactcgtagacacgcacttcacgactccgaaaatgctctcctttcacgatttggggcagaaatgatggccaaaggttgaagctttgtttggagcttcaatggagaacgaaggagaagagaatggcaacgtgagggagagagagagctgtctgaacagtgtgggggctgagtgaagagagagaaaagctttttggttttaaatacaaaaggggctttctcttctctctattattttatttaatcaacgccacatg

SEQ ID NO: 303105 - DNA, 433 bp, Glycine max
ttgatgcaacatttggagaggttaatgaaacatcttgttgatgcgctccatgagaggttggatcaaatggagaatagagatcataatgaagaagaaaggaggagaagagggaatgatggtgttcctagacaaaaccgaattgatggtattaaactcaacattcctccatttaaaggaaagaatgatccggaggcctacttggagtgggagatgaaaatagagcatgttttctcatgcaacaactatgaggaggaccagaaggtgaagcttgccgccacggagttttccgactatgctcttgtgtggtggaacaagctacaaaaggagagagcaagaaatgaagagccaatggttgatacatggacggagatgaaaaagatcatgaggaagcggtatgtgccggctagttactcaagggacttgaaattcaagc

SEQ ID NO: 303106 - DNA, 395 bp, Glycine max
ttcttatgctttccaagacctccctcatccgcggactgcatgcatatgtgctgctcttcacccccctgatcgccgacttccaaccgaccttggtgctgttatatagttttccagccccaaagcttacaaatctgttttaaatccaagcccataaataaaataaaatcaaatctagataagataagataagatctagatgagatcaaatctaaataatatctagataagataaatttttgtagaataaaatagtctgccctcttcaagtccaaactcaattctggattcaagtccaatgcttcattaattcctgaaattatattaaaaacatcaaattagctgaatgggcccaaataataaagctgcataattaatttgacaattaagactaatta

SEQ ID NO: 303107 - DNA, 428 bp, Glycine max
tctctttctcaatcaacctgtctattgactaacttttctaattaatagttcacatacttgttctttctttgtctaacatacatacttgctcaaacttatgaaaagaaacacaaattccatcacaatcatgcatttaatccaaaagcccaagtgattaattaaagacttcaagatcaagcatcaagaatccaatccaagattcaagattcaagagaagaaatcaagaagcaacaagtcaagacttcataaaggataagtattaaaagaatttttcaaaaaccaagtagcacagtttgttttacaaaagaattttctcaaattttctaagttaccaaagtgattactctctggtaatcgattaccagttatcagtaatcgattactagtgaccagtttggttttcaaaatgttttcaaatgatttgtaac

SEQ ID NO: 303108 - DNA, 248 bp, Glycine max
ggataaggcggcggaagggactacttacgctcctgactatgacagcccccgctttacgagcgctatacaccagctagcgcttcgacgccaccaagggatggtcgtttcttcgggagcgacgccgttacctcagggacgacgagtctactgattctcctgatgaaacagggccccggcgcgggacatcactggttactcccatggccaagttcgatcaagacactactcttgagtttatgcccatgctc

SEQ ID NO: 303109 - DNA, 412 bp, Glycine max
acatctagaggtgctttccaatctgttcttttaccacttattctgccttcttttattttcagagtgggaatgcctctgacagcacctttgtcaatgattttcttcatgcctcttaagtgcagatgtcccaatctttgatgccatattctgacttcatcttctttggaggatagacatgtggaggagtaactgctttcttgacgtgtccatacgtagcagttgtcctttgatctgctgcccttcattagaacttcactcttctcatcagtcactaagcattctgactttgtgaagcttacattgaatccttcatcacacagctgactgatgctgatcaagtttgcagtcagtcccttcaccagcagtactttgtccagactatgaagtccatcatggactaactttcccattc

SEQ ID NO: 303110 - DNA, 377 bp, Glycine max
ttgcttgtggactataccttcgaccgaacacggtcgtgtttctgtctacgcccggattcaaggcgggctgcagcaccggctccgcttccctaactgtactggaggcggttgccgtggctttatcctctatggttttctggagttttaacatgacttccaagatggaagccatttgatcttttaaggccgatagatcggccttcatctgttcttgcacgcccttttcattatccatttttttggatcgagtgttatacgggtgccttggtgttttcttaattatgatgaaattcctaaagaaataaacaacagtgagtatgccaccaaaacatgagtatgcaaatggatgatcggagcacttggatccaccccaagat

SEQ ID NO: 303111 - DNA, 422 bp, Glycine max
  unsure (1)..(422): unsure at all n locations
tcacgtctacgatcgttgtccactataccacctggtgttgagagaccagtggtgtatgttgatcctgctacagggaaggccgatggtccccacaagaagaaattaagaacatatttggggattgtggcgcgtgataaggtggacatcacctacgagaactggaaggaggtccctactgctcagaaggacctaatttgggaggatattcaggtatttctcttttcttatttgattgtgtgtaattaatagccaaaaaatttcattattgtaataaataaactttgtttcatgttgttaggcggaatttgatatcccagaggcttctgacagtaggacaaaaaggaagttactacagaccatgggggagagatggaggcagtttanatcagacctcacgaggaaatgggcccttgcagccgatc

SEQ ID NO: 303112 - DNA, 381 bp, Glycine max
  unsure (1)..(381): unsure at all n locations
ttgctttggttcttcttcaaattaaaacccgccatgttgttcttgagttgggttgaatcacactcctgtaagtatatttgttactatatattgtgctaacatcatatatatgcatgagaaataaaatgacttaacaaacaaatgctatatctctgaatacctgaatttgatgccctcctgatattgcttgtgactggaggatangtgatctgagaccatctatgtcgttagaactaggtcttagccgtgactctccacaactgttgtcagtttcatgaaattcagaaggtcaccaaaaataacaaaaaaaaaatgctttagttccatcactctcaagagatgtaccgcgtatcatataaaatatatagtatggtagaaaat

SEQ ID NO: 303113 - DNA, 411 bp, Glycine max
tgtgcattacgcaatatgccaatattcatgtccaaaattgacaccgttacaattttgtcacgacattaagaagatagaaagagtaaatgaaatctaatcctcaaaagtatgtatctcattttcattttcgtcctcaggtttaatgaaatgagaaaaaagttctgtgtaaaagcatacacgcaaaaataacgtggaacattattatttaaaaaaaacactaaatataaattattaaaagtaaaaaagtataaattctaattaccaacatcttttaaaacttaaatgtatcatttcttaatttagcatcttcaatatatatatgcaacaacgcctactaaaatacagtttaattttatttaaacgttacatctcagtcaaccacaacttcttaacttacacctgatatatttt

SEQ ID NO: 303114 - DNA, 397 bp, Glycine max
  unsure (1)..(397): unsure at all n locations
agcttagactaaatgtacctaggtacgttggcgatggacaacaaaaagcgagcagtcatggtcgtcagcgcgatggagaaagcttagatgcagaacacggagaagaagagagcgcgagcaatgtaggtcgtgtatgatataagttaaaatgtaattccaacatcgattttcaatacaaaaccgatgttaacaaaatgatgttaacgttaacatcggttttcttctanaaactgatgttaactgatcatatgttaacatcgatgttcaaaaaaccaatgttaacgaacataggttaacatcggttttcttcaaacccgatgttaactaagagacattaacatcgattnttccaaaccgatttaacaaattaatgttaacatcaatcttacaagaatcg

SEQ ID NO: 303115 - DNA, 438 bp, Glycine max
  unsure (1)..(438): unsure at all n locations
tatcgttagtcaagaatgatgcatctaaatacatgatattatgattcatcttgggtagaaagatttatgggtagacaggttatgcactgctaaaactaatatgaatttatatgataccatgagtggatgttaatttatcatgtactcttttttacactctaaagtgtatagaagctaaatcgaagacttttacactatcaaataataatataacaccttatttataactcttactagtattatcataacagtgaatgatgttcagtagtggaagaatgattttcagtcatgcacgattggttgataggataaattatgctgtgagtttatgctaactgaattatataaaatgcacgttctcaaaaaatagccattgctgtcattntattattccttcgattctggttggatacgcttgtgctaacagaggtataataa

SEQ ID NO: 303116 - DNA, 321 bp, Glycine max
  unsure (1)..(321): unsure at all n locations
agcttgtatatttccccaatttatggttattttgtagcgatttttgtaaataaatcttgttttatggttaatgctgcctctagaacatttccattggatttaatgatgaaatatgtgcattctcgggtgaaacagaggctaagttttgaattgcaaaatgtagcagttgggctaagctcaacagttgggctaagcgcatatccaccgctaagcgtantttcantgcgcttaacgcaaaggagaatctggcagagcatcagcatcaaagctgcgcgctaagcgcgacatcaatgcgctaaccgcactacgtgccttcaccca

SEQ ID NO: 303117 - DNA, 434 bp, Glycine max
ctacaatttgaattaaaacgttcaataactgctggtattcgtttaccatatatgtataatcgattacacagtgcaaattttgaattcaaattttaatagctgttgtaaatcagtttttggccactggtaatcgattacatcctctggtaatcgattaccaaagagttaatctcttgaaaaagactttttaacttaaatttcttggccaaaccttttgctacttcaataggaattcccttcctattttaatatactctttctaagactctagaaactttcttgatcatccatcttgaatatctttgtcttgaataaagctttgagaaacatgtaaccctttggcaagctttccctttggcatcatcaaaacattcagcttgatcctttgtctacatagatgactctcaaaaagcactctctaaaagataagatcg

SEQ ID NO: 303118 - DNA, 373 bp, Glycine max
  unsure (1)..(373): unsure at all n locations
agcttatgttcattttcaaaggatgttgtttgctctacatctatactccaatgatcctagatataccaatttaagtcaagtcaaaagatataatcaattccagggatgatcaattaaagattaactaatttatctgagattttccaaagagtttgatcatgcattattctctacctaggtctaccaaacataaacaaatgatcaccacaatacatttgattaancatatgattgatcaatttccaattaaacaataataaaaaggtagataattaattaatataaaaatactaaggaatttcattaaaaaaataaaggattacaattagaaagttacatcatatcccttagactaacgtgactagctatttat

SEQ ID NO: 303119 - DNA, 443 bp, Glycine max
  unsure (1)..(443): unsure at all n locations
agcttgatcaaaacaattatctaatgatttcaatccactcattatattcaattgctcattcaaatcattctcaaacactcatttcatgcaaaacaatccactgcatatcattttcaatcaattcactattcaaacacgcttttggtacaagtaaacaactcaaagtgctgaaatttaaataactaaaatttaaaataactaaaatataaaaactgaaattaaaatgactgaacataaatcataaaataactgaaaataaactaaaattttcaagatgcacaaatttaaatgtcctgctcctgtggttgctcctatgcatgctcattaaggtccaacacctgagcagctggtgaatcctgagagataggctgctctaactcagatgctagtgcagatggtacaacatcatcangtatgggtgctagggatggctctgggatctg

SEQ ID NO: 303120 - DNA, 378 bp, Glycine max
agcttgctttattcttctgcttcttgctaaaagagtcaaatatccattaatgtatatgaacgaatcgctcgtgggtgtcgatttcctaacacgctggctgtacttgacataaacgccaagcgaatcataaataatacctcctcccgtataatttcaagaaatcaggatatactaagactctagttgttcataattctcacttgtctaaactcttttgtattgaaatttacacatttaataaattaatactcgcagctgactaatgtggtacatcattctctacacaatgtcttcacgatatttatactctctctctgcacgatcccatcctctttaaacaagcactctttcggtacaacatacttatgcccaatcact

SEQ ID NO: 303121 - DNA, 399 bp, Glycine max
  unsure (1)..(399): unsure at all n locations
tactcaagcttgttgatgagactctgagacggaggaatctctttgattctgttttattatgaccatgcaacagtatgtatgtttaagagggatatgatatttttacattgagaaattaaaaggtcatctgattttgttgggtatattagaggtcaggtatacaacaatataaaatcgatttgttgattttatgtcaagtaaatcctgtgtggatagggaaagcctttctgaatacctacttgatcaccacatccatctttanaaggaaaattagttgcgctcaaattttcagagatgacattatgctctgtgattatctttttcattgattgaaagtcactaatgatatatttcatatcctttatttatgtctattaaatgctgatgacgttttgccgt

SEQ ID NO: 303122 - DNA, 317 bp, Glycine max
  unsure (1)..(317): unsure at all n locations
gatcctataagtcgantgcacgctgcacgcttttttttgtgtttgtaacatcgttgcaagctacacctttccatcggcaacactcacctttctttctaagacgaaagccttgaacacggatctttgaagctttctttcatattgacaagtgcttggctctcttcttcattgcagacaacagagaaccaccccctggaactggaagaccacaattcacatgcaattataacgataccacacctcatacccgccgagctctgcatgctcgttcgttctgtatcccactcaaacaatttgatgcctgtgatgatcatacg

SEQ ID NO: 303123 - DNA, 373 bp, Glycine max
  unsure (1)..(373): unsure at all n locations
gcctaattcgtctaagagctcgacagcggcgggcattggatatcgatcacgcaccgngatngcatttaaagctctgtagtccatgcaaaagtgccatgaaccatcctgcttgcgaactacgagcacagacaagacgggtcctttctagagcattgatccaacctgcgattcaatctcatgtttctggtaatgtggataacgatagggccgtacgctgactggcgcaccttgcttcatgatgtgaatgtcgaggtctgtttcgcgggccgtcgtcatctaataacggggctcaaataatgcacgaaaatgatcaattcaagattggatacgtgcgtggggagacataccactctgcggtgcgttttctaccact

SEQ ID NO: 303124 - DNA, 527 bp, Glycine max
  unsure (1)..(527): unsure at all n locations
cacacgcaccccaccgcctccgcacgccaccgatagcccaacactaaatcaacaccacatanactnnnttnnntnnggacggaccgcngctcgacntcgtanaacancacanannnaaacanannnggnacacgccgcacacaaaaagcaaccagcacgcacgctttcttgtgacaacacaagaccaacaaccgccggctaaggacgccgcaacaacccaccataccaccgacacaccaaccgaaaccccacccaacccaaccaacgaaacgacgcgcccgacacggcgcaaacagacaagacgcggcccgcgacccaaccaccgacgcccacacaacaccacgtccgaaaacgaccacaccccccacccacccccctccgcccacagcggacccacaacacgaacaccagccaccagcaacacacgcacgcaccagccccacgcaactacaaccaccacaccaccgcaaccccggacacacaccggacacccccacacaacaagacacagccccccaccacccacc

SEQ ID NO: 303125 - DNA, 542 bp, Glycine max
  unsure (1)..(542): unsure at all n locations
acaacgccaacacgagaacaataaatgaccgggataacggatgacgaaccacataaagactnanacaaccgcgagacaattgatgcgtcgtagccccncacntaaatannaaaacnnaagcanngagancggaaaaacgccacacagcaaagaatttcattatcccccggaacgcggaccaggggggggagagaagcgcaagacacgccaagcacagaaggccagaccaaacgcccggcacaaaagccgaccacaggcgcaaagaggaggccaaacaccagctcgagcgccnagcgcacagaaggacgacaaacacacgacagcgagcaacggaccaacgcgccaaccacgcatataacacgaacagaagcagcgcgccgaaacagacgaacaggcgcccatatacaaccagaacaacacaccacgcacaaaactcaacgccgcgcacaccacacgaatgaagcgcaaggggaggcccgaaagccacaaagaggcgacgaggagggaaaaaacccgccaaagcacgcaaaaaaatgaacaac

SEQ ID NO: 303126 - DNA, 234 bp, Glycine max
  unsure (1)..(234): unsure at all n locations
ttgcttgtagttaattcaaacgacaataacttgttaatcggatgtctgattgagtcccgtcatatatcgagacccttcaaattgaatgctgaagctctcagccaattcaaacgacaataactccttactcgaatgtccgactgagtcccgtcatataacgagacgctcgaaactgaacgtcgaagctctgacccaattcacacgacaaccactttttactccnatccctgattg

SEQ ID NO: 303127 - DNA, 428 bp, Glycine max
  unsure (1)..(428): unsure at all n locations
ccgcttaaacattcaatttcgagcgtctcgatatattactagattatatcttacatccgngtaaaacgttattgtcgtttgaattcgctcagaggttcaacatttaatttcgagcgtctcgatatattacgggccttaatcagacatccgaatacaaagatattgtcgtttgaattggctcagaacttcaacattcaattttgagcgtctcgatatatgataggactcaatcagacatccgagtaaaaagttattgtcgcttgaattgtcttagagcttcaacattcaatttcgagcgtctcgatatattacgggcctcaatcagacatccgagtaaaaagttattgtcgtttgaattggctcacagcttatacattcaccttcgagcgtctcgatatatgacaggactcaatcagacatccatgtaa

SEQ ID NO: 303128 - DNA, 331 bp, Glycine max
ttttctttgaatggcgttccatccataagaatgaacattttcattcatgaacctttatcttttaatgtaatctactactttgcgaagtgaccatcaaagacttctattaaaaaactacactacaaaagctctcattgtacaattgagtggtcaatgacctttgataaagaaacacttgctagtaaaagttgcgttttataaataaataaataaaatcatttttatccgtttctgcacactctgaaatcgactaaaagaaattaatatacgtctgcatatataccttacaaacttatggccactcctctcagttcacaagcatatcacatac

SEQ ID NO: 303129 - DNA, 404 bp, Glycine max
  unsure (1)..(404): unsure at all n locations
acctccttaacnttagacccaaaatagccacaacagaacaattatgacctctccagcaacaagtacaatcctgggtggaggaatcatcccaaccttagatggtcgaatccttcacaacagcggcaacaacaacaacaacaacaacaaccttattttcagaatgctgctggcccaagcagaccatatgttcctccaccaatccagcaacaacaataacagcaaacagatgaggcccctccgtaaccttcccttgaagaacttgcgaggcaaatgactatgcaaaacatgcagtttcaacaagagaccacagcctccattcagagcttaactaatcacgtgggacagtcggctacacagttcaatcaacaacagtcccagaattatgatagattaccttttcaatc

SEQ ID NO: 303130 - DNA, 472 bp, Glycine max
  unsure (1)..(472): unsure at all n locations
cggaccggcgntttgactcgatgacactttatanaggcaattctatcttcgcacccggggatcctgtatactcaaagtgcacgcatgcgtttttatgatattataacatgatagacactagattctgtaacttgcctctcactgctaatgaagtagtgaagaacaatgcggaaatgacttatgcgaacagctcatcatgacatggggattgccatacatcaacctattgcagatactgatataactatcttatgaatcaataacattcgttgactaatactgaaaaccacttatattattaataaattctcattcgatactaagtggggccactaatgattactttattgaaattatcattatatgcgccacttaataccccacctatatctcaagctttatcctctttgagacttctcgaatctggaatgttatcttgacccaggcacatcactatactgatcttagccgc

SEQ ID NO: 303131 - DNA, 369 bp, Glycine max
agttctagctgtctaggaacttagacgttgatgaactttgttcaacataaattgagaagtattcctagaagccatcttatgaaagatagacactccgaggtactttcccagatccttagtccacgccatacccatttgtccacttagttgatccttgactcgagcctccacatttttggaaaagaacattcaacatttctccaacctaattttctgcttacaactcttgcaaaacaaattccaaatattcctgattgaatggacctgctccactaaagccttcataaataaaataaggtcccatgcaaaggctaagcgagatataactggaccatgtctcacaagacgaatatggcaccatactctttg

SEQ ID NO: 303132 - DNA, 360 bp, Glycine max
  unsure (1)..(360): unsure at all n locations
tgcttatagtatgcccgagtcattcatccctatgagatgttgttgaagtattggcgatcagaattgccattccttggattataggattgaaccaagctcatgctcttacaaaaaggttcatcaagtcaagttgaaatacggaagtaaccgtcttgcaaaattggggcaaaagatgaatcgagtcacatcactgcttcatctactgccaaacatatttangattgttgatgtccttgttacttncagtttcaccttgacaaagttgtcatggaccatgttgaaaatctaaattgattcaaccccatatcctgcgtaaaaattcgcaatacttcaactgtacatcattcgcatgcatccatg

SEQ ID NO: 303133 - DNA, 437 bp, Glycine max
  unsure (1)..(437): unsure at all n locations
ntgagggtgcgcagcccaccatcttttcatagtagagtaccgataatgtgtctaccatcacgattatcgtctccctttccattattgggggtaccacctgngccgccagatccctccaccttttgggcgtgttctttgaatgatccgtccccctttntgcaaatgttctgtagttgcatcctatccagaaccatatcaaaattgtattgatactgcctaacaaaggcaaccattangtccttccaagaatggactcgggaagattccaagttagtgtaccaggtaacagctaccccagtaagactttcttggaaggaatgtattancaattcctcatcttttgcgtattcccccatcttctgacaatacatctttagatggttcttgggacaagtagtccccttgtacttgtcaaggtccagcaccttgaacttggg

SEQ ID NO: 303134 - DNA, 323 bp, Glycine max
  unsure (1)..(323): unsure at all n locations
aaacaaacaagggaatctcgagtccaatatatctatcgcttaactcttaaagttcattctcaatcaatcgatacatatctcaattcgaacgagaacaacctttaaaactgtccactttacactttgatctatcttatataatcaagggtacataatcacttccgttgtcgaacgcgtcatctcgctgactaatgtctcccttaaacatgaaaaatacaaaatctataccctcaacacgcaaaaagcgncactcacatatgcgagcgctaactttcgtccatcacccctcatcaaacaatctactttacatatanggacaaatc

SEQ ID NO: 303135 - DNA, 370 bp, Glycine max
actcagcttcttcattctgcatcaacgaatcactctttttcacattggactcacccagaacccagctaatcatatattacttttatatctcatgagagaggattgatcttcatctcatatgaaaaattgctgcattctacctgctatgttgcagatatactagcttaaccgttggagaagaataaaccaacaagggacgggcgaggaaaaagagaggaaagtcactggttccaattctttctaactttatttttaacaaaattaacaaatcaatatctaatatttattgataaaaaaattgttcccatgctaactaattgacggacttcaccatttaattattgtgaaatatatactctatatttacaca

SEQ ID NO: 303136 - DNA, 386 bp, Glycine max
  unsure (1)..(386): unsure at all n locations
agcttctatagaaggttcgttcctaatttctctacaattgcatcacctctcaatgagctggtgaagaagaatgtggcatttacctagggtgaaaaacaagagcaagcctttgctttgctcaaagaaaagcttactgaggcacctgttctagctcttcttgacttttctaaaacttttgagctanaatgtgatgcctctggagtgggagttggagctgtattgttacaaggcgggcaccctattgcttattttactgaaaaacttcatagtgccacccttaactaccccacctatgataaagagctttatgccttaataagagccctccacacttgggaacattacccttgtttccaggaatttgtcattatagtgatcatcaatca

SEQ ID NO: 303137 - DNA, 423 bp, Glycine max
  unsure (1)..(423): unsure at all n locations
tcttatccaaggctcatcttggtggtgaatctccttcttccatggcttattccctagtggatggtgcctcctctcacctcttctcctttgttttccgctgcatctccatggtggaaaatcaccattaaaggacctcattgaagctcaaagatctaacctccatagaagccccacaagcaagcttccatcactcaggttgatcaccatggggggaagttgcctgcgcacgacagggtgaccttgatacttgcttcctagttttcctaagtgagagtgtcatgtggacacgcttangctatttcctgacgaatgataccatattgcattttagagttgagtcacgtgcatgcatcattctgagcataatcgatttgaatatgaacaagttgatgactagtttgttaagcgtatgttgaactgatg

SEQ ID NO: 303138 - DNA, 395 bp, Glycine max
agctttattagtgcgggtctgggagacgaaggtcaagtgttcgcgatatgtgaagatgatgttccaagtactttggatttggtccgaccatgccctcctgatttccagctaggaaattggcgagtggaggaacgccccggcatttacgcaacaagcataatgtaaacctttacggttttaaaagctctatagttgggcctaggctttagagttttcattttgttaaggctttgtgtcttttgtttttgaatttataatacaaggatctttcttcatctgttcctggtctctacccattctcattcatttgcatgtttacttctttttctaaaaaatggcagattcgatgacaagtcccccgaaggtactaatacctgggacccgtctatcaactt

SEQ ID NO: 303139 - DNA, 436 bp, Glycine max
tgatcaaaacaattatctaatcattccaatccactcatatcatacaattgctcattcaaatcattctcaaacactcatttcatgcaaaacaatccactacatatcattttcaatcaattcattgttcaaacacgcttttggtacaaacaaacaactcaaagtgctgaaatttatataattgaaatttaaaaaaattgaaatataaaatctgaaattaaaatgactgaacataaatcataaaataattgaaaataaactaaaatgttcgagatgcacaaatttaaatgtcctgctcctgtggttgctcctatgcatgctcattaaggtccaacacctgagcagctggtgcagatggtgtggcataatcaagtatgggtgctagggatggctttgggatctggtttgtagaagcatcctcctcttgagccctgttgtc

SEQ ID NO: 303140 - DNA, 320 bp, Glycine max
  unsure (1)..(320): unsure at all n locations
accgggatcttaagtcactgcagctgcagctttctttaattacatnttctggccgaagtccaacctgccatcatccgcggattaatttcctctgcctgaatatgggtctgatcgctgctgacatccatcgctccaccagattgtggacgagactcacatttgccacgtccactgttctatactaataaaatacttgcccatgtccatgtccttcttgcttacacaaaagtataatattgaatttccctttccttgtacaacatcntatataaatactaccacctcattcctctaaactcattcctcataccccactgttc

SEQ ID NO: 303141 - DNA, 434 bp, Glycine max
  unsure (1)..(434): unsure at all n locations
gctcagtgggtcagttatttaatactggtgcaaaaatntatttttatatattctgaatgaatgagaaatttagatgctaacaaaattaatatcattcctaaagaaattattaaaaattcaacgtgacaaaacagatcatgcaaaaagcatttcaataataataataataggtagataatatagataatagaagatttgtcaccaattaaaataattacatacaatataatcaattgaaaacataattattaatcaaggtaacataattgtatgcacttagtttactatttaaatggattgattgatttgttaaaattttattttaaagtaatcaaaaataaattgtaacatttattattttatttttttgaatttgaactaatttgaattaactaattaaaatagaattaatgacacttagctaatgctgaatg

SEQ ID NO: 303142 - DNA, 395 bp, Glycine max
agcttggcctcaagttccttcgcttccatgcaacttccattcgcgcagaactcgcgaatcgtcacacgctcgttcttaccggactccatcaatcatttcctcgccacctgcacacccacaaagcacgcgcgttaacattttttttttttgcctctttccgacaagtgaagattaccgaagtagattttgtctctttcgataaagccttttccataaacaaccagttaatcaaagccatgcttaaaaggaacctagctacctaccaacattgttggtacgcgcgcgttaacattaacggatccaaacaatgccgttcgagattcatgtgtttctcattagttgcgcgtaaataacggaaagaaagaacaacgtccgcgctgtgaacagagattaat

SEQ ID NO: 303143 - DNA, 438 bp, Glycine max
  unsure (1)..(438): unsure at all n locations
ccttaatctctttgtcaacacaaaaacttcccgtgcaatacttcatttattaacgcgttgccgagggataaacacatctaaagtaaggtgttagattatatgataatatattctgattttatataattcttatatctattagatttatctttagtcatatctttagctattaggtttatctttagttntatagttgttatatctattcgatttatctttagccattccattagatttatctttagccatatctttagcttatatatctttagcttgtaaccttatatataagagaatggtgcttaatgaattattcaaggaaacaatttctttcatggtatcagattgcttaaggaaatatttttgaaccttcctcagccttccgcacacaggccctagcgtcgtttagcccctttcttcttcttctccccttcttct

SEQ ID NO: 303144 - DNA, 309 bp, Glycine max
  unsure (1)..(309): unsure at all n locations
actatccatccatcttcccatgctatctacgcattcactctttcgttccacattaacgtaccatctaccaaacttatattatacacacccactccctagccacctatccttccacaaacctactagatctccaattctccactccatcatcttctcaaaccacccatcacttccacntccacacacttgccttatgttgctccaccacacgaatggatagtgcctcccaccattctcgctattnnttcacataccttgaaatcatattatgtataactttttccattctctatacatcacttattctct

SEQ ID NO: 303145 - DNA, 320 bp, Glycine max
  unsure (1)..(320): unsure at all n locations
gcctcctattaaactgtctgacatcttgattccttacctatatagtaaagatactgccgagaggttgtatctaggttccttgggcataacgtgatgccggttggccaagagcctgaaaaccaacatgtgagtagtgtcctgacttaaatgcaacccaagtaaaactctcttgtctcatacagtcccaagcccccaattgtaatctttgatgagtaatttgacactgattggatgctgggattttgaaagcagaatatattaattctgttngtgtcctatctaaaattacatatcctaccaaattgctaatgcgtggattt

SEQ ID NO: 303146 - DNA, 354 bp, Glycine max
tttcttctaatgaagtgtggagacccaaaatcattcatacttagacgaaattgtcataaagtgatagaagtcactgagacacgccgataaaggacaatgacaaaataggcgtctacaaagtgcttcactagaaaacgaacggcgagctaaaggcgatggccaaaaaacacgttgaaaagagacaacgatagaatacgcaatcaaaatgatttgttggaaaatgaacaacaaacaaaaggaggtggcaaccatcgtagagagagacgaacaaaaaatcatgaaccaataaagtgcataaaaacgtgttttcgtactgggtccaactaaatgatcatgtatgtatggggacaaaac

SEQ ID NO: 303147 - DNA, 447 bp, Glycine max
  unsure (1)..(447): unsure at all n locations
ggaactataaaactccgcttgatgagtactgggaaagatgaagaaattgtgtgcttttgtcctcaccaccagatttctgagcaactccttcttcaatatttctatgagggacttagcaacatggagaggagtatgattgatgctaccagtggtggagctcttggtgatatgacccctgatgaggctaggaatttgattgagaagatggcttccaactcccaacaattcaatgcaagaaatggtgctattattcttanaggagtccatgaggtggccatggattcatcttcatctactgaaaataaaaagtttgaaggaaaacttgatgccttggtcaacctagtaactcagcttgccatgaatcaaaaatctgcacctgttgcaagagtatgtggtctatgttcttctacagatcaccatacagatctttgtccttctttacagcaa

SEQ ID NO: 303148 - DNA, 328 bp, Glycine max
ttgctttgtttatggtacttacccgttgaagatcgaagaacgatgaagaacgactgaccaacgtccaacaatggttgaaacctttgcgaaattcctcacagaaaacgttaccgaaacgtttcggaagcgcctccgcttagattttcttcacggaaacaatttttccaagcaaattccaaagagagagaagtgcctcacgggctgaaccccttccttcttcacttcctcccctatttatatcaaaatacgggaggtggctgtcgcccagctcgcccaggcgagccaggatgcttccttcacaacaacacgcttctggaggaatattcta

SEQ ID NO: 303149 - DNA, 418 bp, Glycine max
tgtccctcacttccatattagagcccactaaggatctcttttatgcttgttctttcctcctccctaagtccagctcttaaatggagtacttccatttgttgtctatattcttcaatactcatactcccttgtctaagcctttggagcttgcccataagctccctttcagagtaggagggaatgtgcttcttcctaagggcactcttaagattattccaatactctactggaggatccccatgaatccttcattccataacaagggaagtccaccaatagagagcctacccttgaaagctaacggtagccaatggaacttttctttcttcgctaatatgatggcaagcaaagagttgctcaaccttcatttcccaatctaagtaggcctcaccattatcttttccatggaaatatggga

SEQ ID NO: 303150 - DNA, 330 bp, Glycine max
  unsure (1)..(330): unsure at all n locations
tttcttgtagcaaactggatgcattggttaactcggtcacccaactggncttgaatcacaaatctgtacctgtcgcaagggtttgtggtttgtgctcctctgctgaccaccatacagacctttgcccttccatgcagcatcctgcagcaatcgagcagcctgaagcttatgctgcaaatatttacaatatacctcctcaacctcaacatcaaaatcaaccacatcacaacaattatgacctctgcagcaacagatacaaccctgtatggacgaatcaccctaacctcaaatggtccanccctcatcaccaaccacagcagcctcgctctt

SEQ ID NO: 303151 - DNA, 381 bp, Glycine max
  unsure (1)..(381): unsure at all n locations
caaatttgatcatcctgctttgatgaatgagaaaactagggcaaatgaaaaggatgagaatgaggaaggaacccgtgttgtggctgtcattcctacatggccaaacttcccaccagcccaacaatgtcatcgctcagccaatatcggcccttctccttacccaccacccaatcatccataaaggctatccctaaatcatccacaaagtttgctagccgcacatccaatgtaaagggcaaaccgaaacaccaaccaagaaatgaattttgcagcgaataagcctgtagaattcaccccaattccatcgcctatgctgatttgctcccatatctacttgataatgcaatggtagccataaccncttgccaaggtcctcaacct

SEQ ID NO: 303152 - DNA, 308 bp, Glycine max
tttctctcttcttatccgcaaatgaacctgcccaacctcactctactccagaaaaagatgatgacaaacatctaaagagtcagttacctaacaattcctatgcaggtgaatcttccactggtaattctgatttaccgaaccaacatatccctcttccattccctccaagagcaatttccacaccaacaacggaacacgcatacaacgaaatcttggaaacatttacaaaagtagacgtccacatacctctgctggatgcactaaagccaattccaagacatgccacattcttgaacgagctgtgcact

SEQ ID NO: 303153 - DNA, 435 bp, Glycine max
tataatagggtgatgttcgaggggccatggatgtgtgttttatctttatattatgatataatattggcaccctttttaatggcaagtgcgacatagagtaggaagttggcagtgtggatctatatcccaaaattacatattgaactttataatcatgagttcctttatagattgggatctatcctcgtagcattctaaggtctagtttgcacatgtatgtgtcaaattggatttgaatgtgcctctacaaccaaaagttatagcccgaggatacttgttgaagttacaatatgagggattgcataaaatctatttcaaatgcataaggtatggtcataaggagaataattgtgtaagtgttggaatgacacaggagcataggaggagataagtacaccaattggagtggttggcgatagcaatcacaatatgacg

SEQ ID NO: 303154 - DNA, 380 bp, Glycine max
  unsure (1)..(380): unsure at all n locations
tgcttctggtgggacatcttgacttgctttccaatctgacattcaccacagattctgccttcttctattttcagattgggaatgcctctaacagcacctttgtcaatgattttcttcatgcctcttaagtgcagatgtccaaatctttgatgccatattctgacttcatcttctttggaggatagacatgtggaggagtagctagtttcttggggtgtccatangtaacaattgtcctttgatctgctgcccttcattagaacttcactcttctcatttgtcaccaagcattctgactttgtgaagtttacattgaacccttcatcacacagctgactgatgctgatcaagtttgccgtcagtcccttcaccagcagtac

SEQ ID NO: 303155 - DNA, 439 bp, Glycine max
  unsure (1)..(439): unsure at all n locations
cttgagcaattcanatggtctgaacttttcacttttagttctgattctggcacatcacatatatagacgctcgaaattgaacaacggaagctctccagatattcaaatggtcataacttttaacttggaggtccgattctggcacataatatatcgagacgcccgaaattgaacaacggaagcacttgagaaaatcaaatggtcattacttttaactcgaaggtccgattcaagcacatcacatatagagacgctcgaaattgaacaacggaagctctcgagatattcaaatgattataacttttaactcggaggtccgattcaggcgcataaaatatagaaactgtcgaaattgaacaatggaagctctcgagcaattcaaatggtcataacttttcattcggaggtctgatactagcgcatgatatatcgagacgct

SEQ ID NO: 303156 - DNA, 385 bp, Glycine max
agctttaaataagaaatatgagtaacaaatgaacatatggtatcattgatatttgatccaatacaacgacagagattcatgttatgtcttaagtgttggatttggactcaatcaaagatcaaaaccatcatatcaacaagcactaatgtgtacaaaaagttgctagcttttacatccacttcattcaaaattccttagattttgattttcaatcgtaagggtatcttcattttttttaagaaattatatttgtacaaaaaatcttacaataaaaaagagagaggaaagagaaaattttgaaatgtaataaatgatatggaaggaaaacatagacatataaaatgatattatataaattgctgcaagaattgctgtacatgtatta

SEQ ID NO: 303157 - DNA, 420 bp, Glycine max
ctataaaactcagcttggggctgcgtggcttgtagttcctatgagcttgggagtttttgaagtgagggggaagagttttgggtgaagaaaacgttccccctccacctctttatattttcgtacaggggttgctcgcccaggcgagctaacctgtaccctttttttttttttttgaggggaacattaaccatgtctcctccttccttatgggttagcgtttgcccacttgaacctacttaaattagaattaggtgtcgattacttatttaaaacaaacaatagtaaaagaaactgcgaatgcaaaggatactgggctgccttgcaacgacgttctctgcttgtttagtgccgggaaggggcaacgatcggtcggtcgtgaccttatccccacttgcatccgtccctatgtacctgtaagta

SEQ ID NO: 303158 - DNA, 369 bp, Glycine max
agcttaaggctacaaatataacactttcatgttaagtttgggcttccacctcctgcaaaccctccttccattatgttaatcacacctcgtagccaagtcttgagtgggaaagtctcactctagcacaatgattctgtcgtctcttgagtctagttgcactctcggctctattgcattccctttcttgctctcatgaaggttccttatccttaatgaatctctgcagctaccccttctaaatcaatttttctattttttccttgaggttaacgcattccttagtgttttgaccaatgactcactgataacgacaatatttggacttggctactcctagtggaggtcactctctagaccacaactgaatta

SEQ ID NO: 303159 - DNA, 413 bp, Glycine max
  unsure (1)..(413): unsure at all n locations
tttatctatctattatgaaacatggttaacttaaaaatatgatttatgatcgtgctttaagcgtttattgaattcagggaaatcctaaatctatatataacgcaatttgggtttttatactattttgaatgccaggagaaatatttgtatgcttctcaactacccatttctacagctttagtctgtccaagaatgtggccttttcttgtgaaaaataatgtttttttttatttttttagaaaatacattctaagatgtcccccttgatatcttcctacctggactacttttagtaactttgtaatgcattcttattagacaatgatacaaacattcctaataacatctttgaagcatgtgatggtaagattgatgatgcttatgtggagccatcatttgctgttgngaaatct

SEQ ID NO: 303160 - DNA, 392 bp, Glycine max
agctttattcaagacaaagaaattaaagatattcaagatggatgatcaagacaagtctctagtcttagaaagggtatattaaataggaggggaattccaattgaagtagcaaaaggtttgaccaagaattttaagttaaaaagtctttttcaacaaatttactctctggtaatcgattaccagtggccaaaactgatttacaacagctattaaaatttgaattcaaagtttgcactgtgtaatcgattacacatatatggtaatcgattaccagcagtttctgaacgttttaattcaaattttaaagcttgtaatcgattacacacatactgtaattgattaccagaggagtttttcagaaaagattctcaacagtcacatctttctgtgtg

SEQ ID NO: 303161 - DNA, 437 bp, Glycine max
  unsure (1)..(437): unsure at all n locations
tctagattagtgtaccagacggcgcgcggccccagccatgctatcttggaagaagtgcattaacaacttttcatccctagaatgcgcccccatcttgcgacaatacattttgagatggttcttaggataagtcatccctttgtacctatcgaaatcaggtaccttgaattttggggggatgacgatgtccggtactaagcaaatatcagccatgtccacgaatggatagtcgccatagccttcaacaactctcaatctctcttcgatgagattgagtttccttttttcctccgttgccaggggtggcccttctgcggacaagaatattggttgtgctgggaggtttcgaggttctcccgtgaggttgggctgaggtagtgtgttgggtgccggcccctcgacgtggatcggngagtangaatcgatgtctccttggg

SEQ ID NO: 303162 - DNA, 394 bp, Glycine max
agcttgtcttagcgtctatgcgagacagaaaccaacatgttagctatcatcgccaagtaccaagaagagttgggtctagccacggcccacgagcatagaatcgcggatgagtatgcccaagtatatgcggaaaaagaggctagaggaagggtgatcgactctttacaccaagaggcaaccatgtggatggatcggtttgctcttaccttgaacgggagtcaagaacttccccgattgttagccaaggccaaggcgatggcagacacctactccgcccccgaagagattcatgggcttctcggctattgtcagcatatgatagacttaatggcccacataattagaaatcgttaggaaacttgtatggtctctcagaccttgactagatacgact

SEQ ID NO: 303163 - DNA, 427 bp, Glycine max
tggactcaaggagaaacataagatggctctagagtaatgtattaaaaaaaactataaaaaaaagactcaacaaacctctagctttggcccttgtttttcacactaattttcaattgaaatttaggaactaagattggtataaaataggcaccaattatagaataaattttgagccaaaacaacaagcatacttccctttcacttttttttcctggatactgatttttctgccaaattgtgtgatgtttagtattttttccttttatccaaatcacttggttctttttttataaattttttctagatgtgtagcaaattcagtaaaaatttcagctcaaaattcgaagtaaccaattctcagtaatttttacaactttgtatgtccaagctgccaacaccagcgatttttttaagcatggtatattga

SEQ ID NO: 303164 - DNA, 398 bp, Glycine max
tttatcctggtcatggatagatcacccaggttcgggtctataagcaatgacaattgccctgtgaagattcgctttcgctacagcttcggtggtttcccttaaccaagccacaacctatgagtcgccagctcattcttcaacaggcacgtggtcagagtcccgagcctcctcccactgcttgggagcttacggtttcatgttctatttcactccccgatgggggttcttttcacccttccctcacggtactacttcactatcggtcacccaggagtatttagccttgcaaggtggtccttgctgatacacacgggattccacgtgccccatcttaatatgaattactcacaacgcaattcaaaataaacttctttaaagaacaagataaatagcaatcc

SEQ ID NO: 303165 - DNA, 437 bp, Glycine max
  unsure (1)..(437): unsure at all n locations
ntaccaagtattcttgagcccttcttccatcaagcttatgtaagtgacctccattttcaactctaaggttgattttcacttcatcttcttgttctattctcacttgtagtttcaaaaccttattttgcacacttgacggttggaaacttgaacctaaactccctcattcttccttctaaatttggtggaacctataagggccaaatttcagttatttttgggattaaattgttagctataataactattgttttttataaaagccaaagcctaggctagttctcccatcttgctaaagattttggagaaagaggagaccatatttttcttcttcttccaagctttaccaagtattcttgaacccttcttccatcaagcttaagtaagtgacctccattntcaactctaaggctgattntcacttcatcttcttattc

SEQ ID NO: 303166 - DNA, 382 bp, Glycine max
agctttgtgtagaagaatgatggataatcttgatccaatcaaggataactattttctaaaaaaggcaagaaagagactgagactttctgatgtagttgttttctcaaaatcacatatttgaccctattttctttggtaactcattttctaattactacctaacaaatattttgaaagaaaataactcttaatatacgcgggataggagcaggtaaatccatattaaaaagctgcaaaatttggcaaaggatacatccagatcttatgcgatcgagttctccattgaaaataatcactttccgttcagtgttcaagaccgcctctttataaagttcttccacaacaagtatttctgaaatacaagggagcagtaatcatgata

SEQ ID NO: 303167 - DNA, 440 bp, Glycine max
  unsure (1)..(440): unsure at all n locations
ttctaactaaatagtgttatgaccatatagatgtgcgtgattgcattgaatgagataatgtgcaaagttgggaatgctaatttcagttgttttgatttaaatacacataaccataacacttgtgtgcttgaaagaaacactatcctcatgagaagtgaagcatggttgatcttctttgatgtttgtcatacttgctaacctattttatctccaagtgcattcttcgcatgcttctatcatgaaaactatgtatgacaaatgtgaacttgagagttagaaattgaagttgtttgaaagatatgtagttgtctcaattattggggctgattacattctaaacattgtcattgacctaacttagtgtagtttagtttacttttgcttgaggagaagaaaagctctattgngggagtttgataattgttatgtatacgtaaatt

SEQ ID NO: 303168 - DNA, 419 bp, Glycine max
  unsure (1)..(419): unsure at all n locations
cttaagtcacctgcggcatgcaagctttcattcccccaccattccctccgtattgttttttagtagattttccaccacccttgctcccgtaactccatggttcagacaatgtagaccaagcataaacatcaccaccccagtttgtcttgttattttttaaacaagatgcaccacgcccaccatgccctccaccagctccatcgttgccaacaggtgtgccactattttgggaaggtggagaccctcctaaagatgatgagtctatataagaattgtatcccattgtcagattggctgcaaataaaaccacagagccagaaacaatggatgcatcttgaccaagtctaacgttgccggatacattgactgttatcatacacccttncatgggacataaaagtgacacatcagagagtatc

SEQ ID NO: 303169 - DNA, 427 bp, Glycine max
  unsure (1)..(427): unsure at all n locations
tactaagcttacgccttaaaaaaatggcccaaagaggatgcaagatttatattataccaacaacattaccttcagtgaagaaagttatttcctatagcattagccgaaaaagatttaattacaaaattttatggcatttcccgttggggagttttctcaagcaagtttcgtgcatggcagtgtgtgttactcagaacatgctgagttatttttagaagaaaagtaaaaacgtgagagatcaccaaaccttggttcagcaagatgcagtgcagaagcaaaaccttcgatttgagactgcctccaaagtagtggagtttcagggttttaaaaatcgtccctgaacaccaaatgtcgcttctttgccaagaatcccgtttgaaacccanaaaanattatagcaggaaccaataaaatggataatggagaa

SEQ ID NO: 303170 - DNA, 125 bp, Glycine max
tttcctcgagcaaattcaaacgacaataactgtggactcggatgtacgatcgtgccccgtaagatatcgggactctccaaagcgaaagcgcatgctatcgcagaagactaacgacaataacttgc

SEQ ID NO: 303171 - DNA, 382 bp, Glycine max
atattatttgttctaatcggacatcctagtcaaaagttattgtcgtttgaatttgcttacagcttcagctttcaatttcgagcgtcttgatatattacggggctcgatcagacatccgagtaaaaagttattgtcgtttgacttttcttacagctcccgttttaaattacaagcgtctcgatatattagagggctcaatcggacatcccaataaaaagttatcgtcgtttgattttcctaacagcttccgttttcaattacgagcgtctcgatatcctacgggacacaatcggacatccgagttaaaatttattgtcgcttgacttttcttagagctatcgttttcaatgtccagcgtctcgatatattccacggctcaatc

SEQ ID NO: 303172 - DNA, 391 bp, Glycine max
tgcttgcatgatttacattctccccctttctcaagcaaattcttaattcttcttgacatcatcaaaatcttcatgatttacattctccccctttgtcaagcaaattctttttgatatcatcaaaacctgcatgatttaaaaaaacaagctagcaattctaatgaatcatcacttcatatcccttcccttttcaaccaagttagcactacttcctataccaaaatcccaacatataaaatttacaacaactttgtacagtttataacataatatgcttaagtcaaacatttatttattcacaaagaacttgcttccctttttctttttcttttctttcttttcttttctatccaataattcaatatttaatttaccttaataccctcattta

SEQ ID NO: 303173 - DNA, 417 bp, Glycine max
  unsure (1)..(417): unsure at all n locations
tgcgaggaaagaagattgccgngtggtggtgatgagctgcatcaagttttccatcaagaagtgcctgaggaagtgcttcagcaagttggtttcgcgcgaagaccaccacgaagcgatgatcatgttgaaggacatgccgcctgagccaaactggtaccaagggaagtggaggagggcaaggcacaatgggaacaatgaggagctcaaaggagagaataataacaacaacaagggagttcaaagaaacagaaccattgccttatcagggcctttggatgggaatggaagaataattcatgagaagatggtgaacaacaacaaggtgatgaaactctctggtcctcttgatgggaaaatgaatggtggtaacaatgagagagtgaatgtgtatgcaaatgcaaatagaagcccattgat

SEQ ID NO: 303174 - DNA, 376 bp, Glycine max
ttgtcttgataattgatctggccaccaagtccaatgcacttctgttatacactctccatctctcctctgacttatttatctatgttgattcttccctctaagggtgtaattggtttagaggatggaaatagacgagaaattttttaattgagtagagcgtaaaaggtgtgggtcccacaaaaaaggtaaaaaacttatctcaaatatttctctcctctctaccaaacacaccattaatgaatcatgaactcacaataaatcttcctgcatgttgaaaatcaattgtcttttggctattgagaatattggtttaacccactgcccccgccttgctctctgaacaccaacccattcccacatctctccatcttgtttc

SEQ ID NO: 303175 - DNA, 430 bp, Glycine max
gtatttatgaaacaactttgcttgtaattctttttcttataattttatataacaaggggcatttgaaattatttatttgaggttataaaagtgactaatgaaatttctataagtttttcattgtattggaccttagatgtaacaaaacttttgttttgggtgcctgtcaagtagtaagtaacaatgtagtgtcatatcatcacttagttgacgataaagattcaacaaaagttttgatatatcaagacaataatgtaaccaaaaaatttattgaagacccaaaataaaaaattgtcatttatcatgaatttcacacatatttaatcttttcttttatttacaagagtttcacgttcgaatttattaataagctcttatttaataacattctattgaataggtgcttcattaacttcgttacctcaatatt

SEQ ID NO: 303176 - DNA, 397 bp, Glycine max
tgcttgcaaaatatggctgattgacgtttctcttaataacacatttagatgtccaacatatgattaggcatggctgtacaattctgtatagtaacataaaacttctcgtgtagacaacaacaaacatcattccacatcatctagccattcaatgactgaagaaagattcatagaaatttgtaatacctatcaaatatttgtccaaagggaaccattgcaacgtaattagcagccacctgtaattacatttcatcaggtattattagagttgtcagagaggcacatggaagtcaagtcagtcttgccatattgagatcaatatcacttgctgacagaggacttaactctactccagacaaaggtcactactcttaagtttattcaagggtgaaaaaac

SEQ ID NO: 303177 - DNA, 431 bp, Glycine max
  unsure (1)..(431): unsure at all n locations
agatgcttacgggccttgaaacatgtgcttttgtttctttgttttatcaagccattttgggcctagtgcttgttccctcatcaagtctataattttagccattagaatacagtggattagggtaatgctgaacttgtattatttttcacgccactcttgaccttaagcttgttaacaatgctttgagtatatgttgataatgataagttaaagagatggcggaaattacacttttgaagtgtgataaagataaaagtagtatttttaagaactagaaagtccaactaaataagttgcaactacttttaaagttgctatactttgcaagttccgaaaacctctggtgtcttgacctatttggcatattgagttttcatgttcagagggaattctgttgtagttgctaggaatgcatntgctggaaacaaaat

SEQ ID NO: 303178 - DNA, 306 bp, Glycine max
agcttatgcgcatatttccttacaaatgttctcttgcacaagacattctattaaccgaaaaaatgcacccatatacaatcaaggcagctccgttacctagattatttacacgtacttccaaggtgtatttgttacttacatcacacacatctccttggctaaattcacatacatgcatactcaaagcattttggattaccaaaaattgcacatgtacacctcttggtatttctaatacctatacatacacaaactctatgatgaatcttgactatctacacaataaggtgctacatttcatgctct

SEQ ID NO: 303179 - DNA, 451 bp, Glycine max
  unsure (1)..(451): unsure at all n locations
gacacttatagaatactccgcttgtagaatggctagacatgatacatgtcatggtttggtttggtttaaggataaaagggatgccccacattatttccatgacacaaatgcaaaaatgatgatttggaaactttatgcaaaactggtcatgcatgcacctatgtggacactcaagtgtcaaatttttatggtcatgtgatgctagggctcaggattcatttcctctattttagtcaacccaatgtttccaaaatatgttcttttatccatatgtgcattcatccgagtccattttgggcgtccggngaaattttcacagcattcacccttcaggtgtatacacatttttcaaaaactagttatgattagtgaatttttttcaaagaaaagttggaagtcatctcttttcaaaagcatgttggtttttcagctagacaacttatttttcttt

SEQ ID NO: 303180 - DNA, 342 bp, Glycine max
  unsure (1)..(342): unsure at all n locations
cgctttgtttcactccctacaagtaagtgcactttgccttggttatttggctctccattgttgtgttttggtgctttagttgctcatattatgcgaaattcgtgaagcaattcacatatgaaaccatacttgttttcgctaaattaaggggttgtaacggatggccttaagcctatgttgcattctggagtaatggggcatgccacattgcccncattctcttgctattcatgcctaaacatgtgcncaccaagtgctcggtatagggacaacatgtacaggttaaaatgagtgcctgaatgcgaattctacgctaagaacccaagctcttgatttcaatac

SEQ ID NO: 303181 - DNA, 407 bp, Glycine max
tcttttagtccttgaacaagcaatctacttctctttcataaccatgctatgtgctcgcgactggtccctttcttcccttcgcaacttgagttcattattgctaccccatagagctccgcgaaatttgttccggccatactcttccttgcgagccctcttggtctctttttcaagggctcttgcggtaattgcattctcttcccgtaacccggcgcactccttccgaacgtgtgtagcagccaacttgaacttctccttggcgagttttgcctttcctaactcgcttttgagagcttggacttcctcgtcctcttccggtgcttcaaaattctcttcgctgacgacttttaacttggcgagccaatctaaacctcgtatgcgaactttcaaccattcgtggtacccac

SEQ ID NO: 303182 - DNA, 337 bp, Glycine max
gacgtatgctttcttgtagagttatgtctcgtctcagttgaatcaattacaagcttatcgtaatcgattacaccgtcgattttgagacaatgactgatttattcaagattctctactttaatcaatcacaatgagatataatcgattacttctctttctataagtgttttagaagaaaacaagaacactttaatcgattgctttgagtatctaattgattatattgttcttgacgcgcttccagtttttggaagaacactctactccattaacaagataatctaatcgattacttcattgacctaactagttatcttgtatatttaaccgattacac

SEQ ID NO: 303183 - DNA, 384 bp, Glycine max
tccacaacatccaagcaaaacaacattcaaacagcactagctatcacagccaagcaaaacagggcaaaggcagaaaactctgctcaacacactaaccaaaatcacagcttttctcacttaaagaccccagtaacaattccttcgatccaattcgttaaccgttggatcgactccaaaattttactgggagtctatagtgcataagcctacattttgaccgttgggatctactagcaaacatccagaacttattctacattactctttccacaaccagcaaatacatggatttttctgcacttgtgcaaaattctgctgcacaattttacagcacaatctgcacaaagagcatatttcgaaaaccacacttcccctcatccaatc

SEQ ID NO: 303184 - DNA, 356 bp, Glycine max
agctctccgttacttttttttttttttgggagggtgaattttgacaacaggcagcttgtattccattggcattgagtggtcgtgatatatgtggtagcgccattaccgggtcaaggaaggcaatctctttgctactttctttgggtgtttgtttgttaatttgtacgtaatgccttgcttctgtggttcggtgcctgagtttctgtatgatggtgtttcttttaatcccctttgatcatatcctgctattgtgcttccatgcaaaccgctcgatttccactacctactttacagagggcgttgcttcgtccaaaccgcatgcgtgcaataagggtgctcattcttactcccaccac

SEQ ID NO: 303185 - DNA, 416 bp, Glycine max
  unsure (1)..(416): unsure at all n locations
taattgcaattntggtcctcgtagttttgcaaatcctcaattttcattctcctagnttctaattggaacatttggtccccctggtcgggtgaacatgtttagaaataaaaacttgtgacttgacccaaaagtcaacgagattgaatgggctaggttggatgtgatccaagcacactaaatgcccaacacaaattgtttggattagtttggtttaattcagcttcacgggtgacccgtatacttaaacacgagatttaaatcttgcacctcccatattgtatcctacacctcccaaaaatgtttgaaaagactaaatttccaaaacacctcgtccatactaatcacagtcctaagacttgttatggcacctccttcacccgtgacaactatgacctcatcctccacattgcaccacc

SEQ ID NO: 303186 - DNA, 393 bp, Glycine max
agcttatattaacaaaattgccttaatcatttccaaatatgcatgtgaattaggacgcatcaacaagaatcaagccaaggctattgtgcaagcaatcaatggggcaaaacacaccaaatgattataatgatggatggctcaaattctcacaaaggtaaaatcatcactttcaaattgagctttcaaaactatcatgacatgtagagaagaatcaaggatttcaagtcacaaaatgtcaagaacttttattttcaaaacaattacccatttcttgaacatatcctataatctaaagaaaaacatgcaaagtcgtacgtgcacatgaaattgacccaaaatattaaactgaaaatccgacgaaactaacaacattaacaaattaacacaactaac

SEQ ID NO: 303187 - DNA, 438 bp, Glycine max
  unsure (1)..(438): unsure at all n locations
tgtgcaaatcaaatcactcctacatctcatctctagcatgcattttctttctttacccactcctcacgtttgaaaacaccataactaaacgcgccgcaagggatccctatcgcaccagatccaaatctagaacgatgggcgatcaagaggagacacaggaacagatgaaagccgacatgtcggctctgaaagaacaaatggcctccatgatggaggccatgttaggtatgaagcagctcatagagaagaacgcggccaccgccgccgctgtcagttcggctgccgaagcaggcccgactcccttggcaactacgcaccatcctccctcaaacatagtaggacggngaggggacgcactgnggcacgatggcagccctcacctgggatacaaccgagcggcttacccttatggattgccgcccaactattcaccaccca

SEQ ID NO: 303188 - DNA, 385 bp, Glycine max
  unsure (1)..(385): unsure at all n locations
agcttttattctctgctgatgaagatgaattggtggctacttcatgcaatcctctaatgacaatagcatcacttctggccgtggtcctgcaagcaaggaaatctttttctaagaatactctcttgaggtcatcccagctcgtgatagaccgtggagcaaggtaataaagccagtcctttgccactccctctanagaatgangaaaagcctttaaaaatatgtgatccctctgcacatctacgggtttcatggtggagcacaccatatggaattctttcagatgtttgtatgggtcttcacctgcaacgccatgaccacttggagcaaatggactcaatcagttctaagaacatatgggacatcctcatctgggtattggatgcac

SEQ ID NO: 303189 - DNA, 428 bp, Glycine max
tgaatttacaacgttccaattgatttcaaaatgttgttattgattacaatgatttggtaatcgattaccagtatgtttgaacattggaattcaaatttaattgtgaagagtcacatcctttcacaaaaaagctttgtgtaatcgattacactgatttggtaatcaattaccagtgatagtttctgaacaaaatcaaaagatgtaactcttccaatagttttcaagtttttcttaaagtcataacttttccaaatggtttttaagtttttctaaaggttataactcttctaatggtctcttgactagacttgaagagtctataaaatcaaggctctgatttgcattttatttaaaaaatattcattcattctttagacaacaaacttttgccaattgctttctgaatatctttgaactccttcttcttc

SEQ ID NO: 303190 - DNA, 403 bp, Glycine max
  unsure (1)..(403): unsure at all n locations
agcttctttgaganaacttccttgagaagctagagcttagctacacacacccctctcataactaagctcacctccttgagaagcttccttaagaagattcctaaagaagctagagcttagctacacatacctctctaatagctaagctcacctccttgagatgagaatctagaacttagctacacacccccaataatagctaagctcacccccatgacaaaaaacatgaaaatacaaaaaaaaaagtccttactacaaagactactcaaaatgccccgaaatacaaggctaaaaccctatactactagaatggccaaaatacaaggcccaacctaaggaaaaacctattctaatatttacaaagataagcgggctcatacttagcccatgggctcgaaatcta

SEQ ID NO: 303191 - DNA, 343 bp, Glycine max
  unsure (1)..(343): unsure at all n locations
actcagctatacctttgcttatttattcattataagttcttagtgataaatagaatgtgtaaccatttgcatagcacaacttgtgaaactttagcatcatggataacaatcaatatataaatctaggtgtacctgaaataattgctactttagaatacatanaatggccgtgcttaaagaatcaatggatcgttgatcatgtaatatctacctacaagaaagtgttttttatttttattattatacaatggactaaactactataaattaatcgagataatattgtagagtacgcaacgaattggatctattaaaacaaatattcatgattataaaaatagat

SEQ ID NO: 303192 - DNA, 363 bp, Glycine max
tagcttctatggaggctggatctttgagcttcaataaggtccttcaatggtgattttagccatggagttgtagcggaggataaaggagaagaggtgagaggaggcgccatccactagagaataagccatgaaaggagaagcttcatcaccaagagctccttggataagaagtttagaaaggaagcttcaatggaggaagagaatgagagaaagagagaagggggggcgtggaaattgaaggagaacacggagaaaagttgaactttgaagtgtgtctcacaagtttctcattcatcaaagttatggcaagtgttacacatgtttctatttatagcctatcacatgggaaacttccttgagaag

SEQ ID NO: 303193 - DNA, 406 bp, Glycine max
  unsure (1)..(406): unsure at all n locations
taaggttaaattagaccaactatgggttggtgtcctcattagcaagttttgaagcacccagcagtggcaggatttttgactcattgtggttaaataacccctcattatagtgcagtacttgacccctgtatgctataatgcagttgctacaccaaaccaaatactttttatataatatgttcaaaactaaagtacttaaataaaaactggagaaacaatgttgggcttggttggaaaagggtgaaagagaggctgagggacaggaaaatgcagagggtatagagacaaacaaagcatgaataggtgtttggctgctggaaacttgagagagcaaagtgtagatgagaaacaagcatatgcggcttcacgatgcanaaacaagggtgaagtagtggcaatatgctat

SEQ ID NO: 303194 - DNA, 283 bp, Glycine max
tctcctttagtttctctagcctatacgtagcgggttgcttgacaacgaaggaacatgcacgtcagatctgcggaaagtgcctcttcatactagaggcctcacggacgctctaaggactcttccttacctcatatccaaacgctcaatctttcaggcctaaacaccataaaatctattacacacacaaacaactactacaattcattgcttcactatctttaaacttttaacaagcaaatctaccataactattctcgatacaactgcttttatcataacatat

SEQ ID NO: 303195 - DNA, 416 bp, Glycine max
actcagcttgaattagtacaagcctacaggtccacagtgtgtttctagactctccccagcaggttggttctagctcgggtcttgatgaaacctattggataatgcctaaagaggcccaagtcgcactaaattgtgatgtaagaattgtccagtttggtaaagttgtacgttatggaggagttattcacaatcatgcagtgagatttatttttggttttaagctcagtcaagagaaggttttgtcctatatgggggatataagtctattcttaatagcatcaaacttgctttgaatataaggttctactcaattcatattgactcatgcttagttgaggctattgaagcgctacaggataattgagatcgtcttcgtactcattaccaactaattcaagagatccatttggtgcatg

SEQ ID NO: 303196 - DNA, 387 bp, Glycine max
  unsure (1)..(387): unsure at all n locations
agcttcaacatcagaccacttccagggtgctggaactacttcacatggatttgatggggcctatgcaagttgaaagccttggaggaaagaggtatgcctatgttgttgtggatgatttctccagatttacctgngtaaactttatcagagagaaatcagaaacctttgaagtattcaaagagttgagtctaagacttcaaagagagaaagactgtgtcatcaagagaatcaggagtgaccatggcagagaatttgaaaacagcaggttcactgaattctgcacatctgaaggcatcactcatgagttctctgcagccattacaccacaacagaatgggatagttgagaggaaaaacaggaccttgcaagaggctgctcgggtcatgc

SEQ ID NO: 303197 - DNA, 392 bp, Glycine max
tcaacattcaatttcgagcgtctcgatatatgacgggttctaatcagacatccgagtaaaaagttattgtcgtttgaattggctcagagcttcaacattcaatttcgagggtctcgatatattgcgggactcaatcagacatccgagtaaaaagttattgtcgtttgaattggctcggagcttcaacattcaatttcaagcgtctcgatatatgacgggactcaatcagacatccgagtaaaaagttattgccgttggaatggcttaaaaggttaacaattaaatttgaaccgcctaaatatattacggaactcattcaaacttccgagtaaaacgttattgtcgttggaattgcctaagaggttcaacattcaatttcgagcgtctcgata

SEQ ID NO: 303198 - DNA, 350 bp, Glycine max
tgcttttgctagttggaatcatttatcctatctccgacagccaatgggtgagtctcgtccagatagtcccgaagaaaaccagcctcaccgtgatcaaaaatgagaaagaggagttgattcctactcgggtgcagaacagttggagagtttgcatcgactataggagactgaaccaggttaccaaaaaggaccattttcccctgccattcattgaccaaatgcttgaatgccttggaggtaaatctcactactgcttccttgatggtttttctggttatatgcaaatcactattgcccctaacgatcaggaaaaaaccacattcacttgccctttcggcacttttgcctat

SEQ ID NO: 303199 - DNA, 418 bp, Glycine max
  unsure (1)..(418): unsure at all n locations
ctttcgtcttacagacagcaaagaataatggttatactgttcaccactcgagtatttccgccagtcagcgtgactcaaatgtcagtatgacagatcttgtgagcgcggaagatgacgtaaatctacgcgtgtcaacgggcttgtcggccgtgattgacgaagggagcagaagactacggtagtctctgcgtgccatcaagcttttcgtcttacagacagcaaaaaataatggttatacggatcaccactcgagtatttccgccagtcagcgtgactcanatgtgagtatgacagatcttgtgagcgcggaagatgacgtaaatctccgcgtgccaacgggcttgtcggccgagattgacgaagggcgcacaagacgacgttagtctctgcgtgctatcaggctcttcgtcttacagac

SEQ ID NO: 303200 - DNA, 320 bp, Glycine max
cgcttataaagaaaaattatgacatgattttaacccaatcacattatgttgaaaagttattgaagaagtctaattattctgatgtgaaacttgtttctacttcttataactcattcattaagttaaagaaaaacttgagtaacggaatttcttcacataaatattctcaaattattggctgcttgctgcatttgacaaacttctctaaggctgacattgcatatgcagttgatagattagaaagtaattgagggatttagtgatgcacactggatttctaattctaactaaacaaaatcgacaagcggttatgtttttac

SEQ ID NO: 303201 - DNA, 430 bp, Glycine max
  unsure (1)..(430): unsure at all n locations
taatgttatatctgactgctgggaagagtgctaagatcttagtgctcangcttatgctcacattcagtgtcaagatgaacaaaggctctctcaacttcagggagttcttcgatccttatctgcaatgattctccaattgcatgtgcttctttcagtggaagatcctccggtagttctatgtccacctgtttatgtccaacatggatacgaatttcaaattagtttatatcaaattccctttaaatttgttaacatcaaatgtgttttatgttaatacatatcacatggagattggttaaagcacatggtcctacatcacataagaagttccttctttattgagaaaaacatgttttaagttcctaaaataggataaattattatataatntgcgaccaanattatatattccgaactagctntacataat

SEQ ID NO: 303202 - DNA, 374 bp, Glycine max
  unsure (1)..(374): unsure at all n locations
agcttttattcntctatattctctttcactcttatcctcgatatatttattcattctccttattaccatttttaaataaatcatgattttgttattgtcgcaacctaccctacgacgggacgacgaaggaaaaatcgataagccaaagcgttcgtctccaagggagaaaacgagcggagtcgccaccaacgtttattcaaggaaaatgttagaaaaatcaaaaagaggtatgcaaattttggaaataagggttcagaagttgtttacgcatggggaaggcattaacaccccacgcgtccgtcacaagggacgacaggctctaatcgagtgtgcataatgcaacttcagaaatatttacttttccctctttatat

SEQ ID NO: 303203 - DNA, 426 bp, Glycine max
  unsure (1)..(426): unsure at all n locations
tatcctgcaaacatttataatagaccccctcagcagcttaaccaacaacagcagaataattatgatctttcaagcaacagatacaatccaggttggagaaatcatccaaatctgagataggcaagtcctccacaacaacaacagcctgtcccttttttccagaatgctactggtccaagcaagccatatgttcctcctccaatgtagcagcagcaacagcagcagtcacaacaaagacaataagcaactgaggctcctcctcaaccttccttagaagagttagtgaggcaaatgaccatccagaatatgcaatttcagcaagagacaaaagcctccattcagagtctgacaaatcagatggggcagatggctactcagttgaaccaagcttagtccanaaattctgacaaatggccttcacaaact

SEQ ID NO: 303204 - DNA, 359 bp, Glycine max
  unsure (1)..(359): unsure at all n locations
tttcttgttgacacgtggagatttacgttatcttccacgctcacaagatctgtcatactgacttttgcttcacgctgacggccggaaatacccgagtggttatccgtataaactttttgcattctgtaagacgaaacgcccgataacacgcagagactaacatcgtcttctgcgaccttcgtcaatcgcggccgacaagcccgttgacacncggagatttacgtcatcttccgcgctcacaagatctgtcatactgactcttgagtcacgctgactgcccgaaataccccagtggttatccgtataaaccttttgctgtccgtcagcacaaaagcctgataccacgcagagactaacgc

SEQ ID NO: 303205 - DNA, 424 bp, Glycine max
  unsure (1)..(424): unsure at all n locations
ttntgtcttacagacagcaaaacgtttatacggataactcactcgggtatttccgcccgtcagcgtgactcaaaagtcattatgacagatcttgtgagcgcggtagatgacgtaaatctccgcctgtcaacgggtttgtcagccgcgattgacaaagggcgcagaagacgacattagtctttgcgtgttatcaggcctttcgtcttacagacaacaaaaagtttatacggataaccactcgggtatttccgcccgtcagcgtgactaaaaagccagtatgacagatcttgtgagcacggaagatgacgtaaatctccgggtgtcaacgggcttgttggccacgattgacgaatggcgcagaagacgacgttagtctatgcgtgctattaggcttttcgtcttacagacagccaaaagtttatac

SEQ ID NO: 303206 - DNA, 398 bp, Glycine max
  unsure (1)..(398): unsure at all n locations
atctaacccttgtagtagtcatagaagtcaagaagattgttagttatgaatgcagaaaagagaaatgagaaattgatagaaacaaacaaaggaagaaatggaatgttagtttcattaatgtaaaaggatagcttgttttcaatagaagatatttcattaaagttctattattttaacaataaataattaatttattaaaatgaactcaatcataaattgttaattaagtatgatataaatttgtcaagtttttcacaaattgaccaattttatattaattacttcaaaaatgatatttatgacaatttataattaaatattattagttaaaatattctacttagtgtatcgaaattaaaattttaaataattgatatatattgcgtataattatttcn

SEQ ID NO: 303207 - DNA, 432 bp, Glycine max
tgaatgaatgtaagacacatcttcttcaacctttgtgattcttgactccatttcattgaagcgcatatccacttgtaattccaaattgtcaaacctctcaccaacaaaggtttgaagaccatcaaacctgtccaaaatctttgaaaggagagatgaatcttctccatcatgtccttctacaccaacatgtcgaccacctttcttcacctaagagccatcatgctccttttgataaccaaaagatgctatgactgaagcgcctataaggaaagatctcttgattggaacataaggttcacaatcaagagggatgttgaagtgttgaaggaaaagggtaacaagatgagggtaaggcaatggagcattcaatcgcaatgccttatgcatgcgatatctaacaagatgtgcccaatcaattcgtaaacctttatg

SEQ ID NO: 303208 - DNA, 394 bp, Glycine max
ttttccaactatagctcaattatatttaatagttacatataaccgttttgcgcgttgtaaaaaagtaatttttttagtagtagtaatagtcattcactctataagtccaacaaaataaatactttccttgtgtccatacggctgcctattaagtataccattcatgaaacttacaaatacttttactataatataactatattaaaatattaacttgcattaatatatattaaatataaacataatattaatatatatatatatatatatatatatatatatatatatatatatatatatatattaacgtcgatgtatatcaacatgatatattaaaatattaatatagatctacattaatatacatatatcacaatatgaacgcataagtacg

SEQ ID NO: 303209 - DNA, 432 bp, Glycine max
tcttaatccataaatgaatctttgcaaatagcataccttcccagcttccttcgactaagcaaaaccctcgggttatgttatgtacacatccttaagaagattcctattaaggaatgtagtcttgacatccatctacaagacctagtcatggtacacaacaacaacaaaaagaatccaaagaaatttaagcatcgcaaatggtgagaaggtttcatcatagtctataccatgaacttgcttgaaaccttttgccactagtcgtgccttataggcattcacctttaccatccatgttagttttcttcttaaagaccacttacaccttatgaggttttaccccttaatgtgaatcaaccaacgtccaaacttggttaatgtatatggactccatctcagatcccacaaccttaagtcacttctcatatccaggcg

SEQ ID NO: 303210 - DNA, 403 bp, Glycine max
ttttatgccttggatcttcttcatcaatggagtcctttgcttcttgaagatcaatggcagcagaatggagaatgaggaaagatgattggagacgccacttcaaggagaagatgagtcaagaacaacctcaccaccatacgaagccatggataagagcttataggtaggaaaagatgagtggaaggagagggagagaaggggcacgaaattttgtgcctcaaatgaggtcttaactttgaagtgtaattctcaaatgatcaaagttgaaaaaatgcacacacgtgaccttatttatagcataagtgtcacacaaaattggagggaaatttgaatttctattcaaatttcacttgaatttgaaattgaattcgtggaaccaaattttggagccaaaatttcactg

SEQ ID NO: 303211 - DNA, 428 bp, Glycine max
cttatccaaggctcatcttggtggagaagctccttcttccatggcttattccctagtggatggcgcctcctctcacctctactcctttgtcttccattgcatatccatggtggaaaatcaccattaaaggacctcattgaagctcaagatccaacctccatagaagccccacaagcaagctcccatcaagtggtaatcagagcacaagagcatcaagtaggtgctccttaaacctccattaatttttttatgctttaccttctcttccattgttgtttcttcatgtctctccatttatctcctcacatgtcttgagataaatgttgcaaacatgattctttagagtttatacttattaaactatctatacaagctagattagattctctatggctcaaatctctagacttgttcttgatcatgaatag

SEQ ID NO: 303212 - DNA, 379 bp, Glycine max
accactaccatacacatgggtggaaataagacatgttgggcttacgtcctatccacaattcataaggatctcttttaagattggcctaatataaattttattttgtaaataatagacaatgtttattggttcagcccataagtgtttaagggttgagtgatcactaagcatggtcctagccatttcctgaagaaatatacttttcatttacctctaaacatattctaatttggtgttcttggagtggaaaattgtggtgaataccaatctcttcacaaaatatttcataatatcattttcaaattctcccccatgattacttctaattgaagagatacatgataatgactattgaattactccaaaacagataaaacta

SEQ ID NO: 303213 - DNA, 59 bp, Glycine max
tgtacggttaaagtctcacgattgacacgtgctcatgcttttttgttagccgaggctat

SEQ ID NO: 303214 - DNA, 401 bp, Glycine max
ttgaaattaatagtatacacacattgtttctgtatatataatgtccctgtatatattgtgtaaaaaaaactgtaagtacaaataaaattaacaagtgtgtatgctgtaattccatggatgaaaactaagtgcctaaataaagggcaagtatgggataggaatgaatgaaaaagtgaaggttattctatggatgaatgctctcctagaacctaagcttttgaatcctagaaaaaccatgaattgttggcagcctaaccccattacaagcctagaaagtccttcggattcattttgtgtgttcattgttgtatcatgtgagatgaaatgcaaacgttgggacttgtgctagttgtttatgatggaataagcctaaacacttgagcttgagtgaaacaatgacg

SEQ ID NO: 303215 - DNA, 484 bp, Glycine max
  unsure (1)..(484): unsure at all n locations
cgagtgcntttgatgcttggctccntcgcgccctatagaatactgaagctagcctggccgatgcatctagtgtgatggccctagttatgttggaggatcgatgacgttcccggaatgggattaggactatgacctcggtgactttactatgcctgtatatagtcttaggagatcgtgggacagtatggattatgctatgaccccactgcatgcatgcttcttgagaatcttaatgggaacgatgggcggtggtcaaatctcacagttgtaacaatatcgcgaaggaaacccgtcataccgcatctactgagcgttataagcacggttctggtagacgatggactactgacgttttatcgaccatgatgctccgagtgcgtcggatatgactcgaccttggcctcctggattggagacgtggtattggcgattggtggatacccgcgacattgatccagggatgctcatgtatacgctgacggtn

SEQ ID NO: 303216 - DNA, 405 bp, Glycine max
  unsure (1)..(405): unsure at all n locations
atgcattcttgtgcaaatcaaatcactcctacatctcatctctagcatgcattttctttctttacccactcctcacgtttggttttttagggaaaacactataactaaacgcgccgcaagggatccctatcgcaccagatccaaatctagaacgatgggtgatcaagaggagacacaggaacagatgaaagccgacatgtcggctctgaaagaacaaatggcctccatgatggaggccatgttaggtatgaagcagctcatagagaagaacgcggccaccgccgccgctgtcagttcggctgccgaagcagacccgactcccttggcaactacgcaccatcctccctcanacatagtaggacggngaagggacgcactgngacacgatggtagccctcacctgcg

SEQ ID NO: 303217 - DNA, 343 bp, Glycine max
ctccatttcatcgaagcgcatggccgctagtaacaccaaatcgtcaaacctctcaccaacaaaggctagaagaccatcaaacctgcccaacacctttgaaaggagagatgaatcttcaccatcatgatcttctacaccaacatgtcgaccacctttcttcacctaagagccatcatgctccttttgataaccaaaagatgctatgactgaagcgcctataacgaaagatctcttgattggaacataaggtccacaatcaagagggatgttgaagtgttgaaggaaaagggtaacaagacgagggtaaggcaacggagcattcaatcgcaatgccttatgcatg

SEQ ID NO: 303218 - DNA, 401 bp, Glycine max
  unsure (1)..(401): unsure at all n locations
tcttatcaaattgattaaaaatactatgagaaagaaagataaggtcaagagcatatgtacaacaatttttatactagttcactctctatctctagagaagctacttcagttatctaattcaatatgaatcggattttcaccatgcacatagaattcttacaaacaatcacaatcaatctcagttcttccctagaaaaaaggactaaggtacccaaccctagggtcccttgtgaatacgagcctaagagacacctacccttatcccaaactagaaaatcctattctagcatatatgccttcaaaaattcatgcatatgctaacaacatgtaaaacacatgaaaaaatgagtcagagagatacacaacctgatcattcacatgcaagaaccttttcttgtttn

SEQ ID NO: 303219 - DNA, 427 bp, Glycine max
cttaaagaggtccacgaaagataaagcggccgtttgaaccagttccgctcccgagtatgacagccaccgctttatgagcgctgaacaccagcagcgcttcgaggtcattaagggatggtcatttctccgggagcgacgcgttcagctcatggacgatgagcataccgatttccaggaggagatagttcgccggcggtgggcatcactggttacccccatggccaagttcgacccagacatagtcctcgaattttatgcctatgcttggcctacggatgatggcgtgcgagatatgagatcctgggtgaggggtcagtggatcccgtttgatgcggatgctatcagccagctccttggatatcctttagtgctggaagagggccaggagtgcgagtatggccagatgacgaaccggtccgatggtttt

SEQ ID NO: 303220 - DNA, 405 bp, Glycine max
  unsure (1)..(405): unsure at all n locations
tgcaatcttagctttattccttacaaccactaccatccaaatgggtggaaataagaaatgttgggcttacgtcctttccacaattcataaggattccttttaagattggcctaatataaattttattttgtaaataatagacaatgtttattggttcagcccataagtgtttaagggttgagtgatcactaagcatggtcctagccatttcctgaagaaatatacttttcatttacctctaaacatattctaatttggtgttcttggagtggaaaattgtggtgaataccaatctcttcacaaaatatttcaaaatatcattttcaaattctcccccatgattacttctaattgaagagatacatgataatgactattgaattactccaaaacaaataaaactan

SEQ ID NO: 303221 - DNA, 429 bp, Glycine max
  unsure (1)..(429): unsure at all n locations
ccttgagaagctntctcgagaagattcctagagatgctagagcttagctacacacacctctctaataactaagctcacctctttaagatgagaagctagagcttagctacacaccccttataatagctaagctcacccccatgccaaaatacatgaaaatacaaaaaaagtccctactgcaaagactactcaaaatgccctgaaatacaaggctaaaaccctatattactagaatgaccaaaatacaagcccaaaaaaaaggaaaaacctattctaatatttacaaagaagagtggactcaaccttggcccatgggttcaaaaaatctacccttaggttcatgagaaccctagggccttctttagcaactctagccgaatcctcttgtagtcttctatccaatacccttggggggttggattgcatcag

SEQ ID NO: 303222 - DNA, 392 bp, Glycine max
cttgcttaaggaaaccaagttcagtatcgcttatgccaatgacttgttggtagaaagaaccattttgtgtgggtgcagacgggcaacaacttccaattgaggagaaagaataacttcttcacaaatcttctcagtccaacatggaaatgcaacctatttttaaaaaaaataggttttttactagctacaaacaagttagtaagttgtaaccctatcctagaaacaaaacaataacccatttcctagttacaaaacactaatccatctaaagcaaagaatcttgcaagttaaaatcatagttgctcatgagatcttcaactccattatttccaataacatctccttcatcattcaaatcaataatgtcaaaatcttccaaaggcggtgatgct

SEQ ID NO: 303223 - DNA, 572 bp, Glycine max
  unsure (1)..(572): unsure at all n locations
tctctcatgtcgcgccagtcagccaattcgcgttaataacgnagattatcggcggtgcatctttcccntctcncccagagcgcanttgttgatgcactcgtattccgngacactatantatactcaagcttgtgctaaaggaagacataacatgtgttgagatgcctttaaccttacctcacatgaaactcgatgaagatgggatgattaaccagttcgatacagatagatggaagcctaatagaagaagcctggttgttgctaaggtaagaaagaaggctcattatacatcatgcacggaaaagatatgcacaagggaaagacaaattgttgcttcaagatgcaactcaaagaatttgtggcacatagatattggcgacacttcgagtgaagaaaggttcgaaagtttctagccaaatgatctactttccaaacacttaagaggcaacccacttgaatcccttgaagattgtcttgcaggtaaataatgcagagtgtctttccaaagattgaatgaactagaaggagatagcatatccttgatcttgtccacttagatatctgctcaatgg

SEQ ID NO: 303224 - DNA, 397 bp, Glycine max
  unsure (1)..(397): unsure at all n locations
ttctccttcttttccctataaataggggaaggatggaagaacaaaaatgttcaaccctcctggtatctgaggatcacttaaaattagtgagaaaaattgtttccgtgaagaaaatccaaactgaggcgcttctgtaatgcttccaagacgattccgtgggcgatttcgcaaaggtttttcgccattcttcatcattcttcgttcgctcttcagtcttcaaccggtaagttcccgaaatcaaacttttcaattcattctatgtacccttagtggtcctcatttgtttcgcatgcttttatttttatttcatttactttccgtacccccttttgacgtgctntagtaatttatttaagtcattttctcgcatcctcaaaactagaatgaatttccaccg

SEQ ID NO: 303225 - DNA, 488 bp, Glycine max
  unsure (1)..(488): unsure at all n locations
cgacgagctcttttgatgcgatcgctagctatgtcagngacactatataatactcacgctgtaggctgttcaattgcttcagattgttgcccagaatggcaaaggtctgtgtggtggtcggcagaggagcataaaccacaaagtctggcgataggtgcagattttttattcattgccagttggattaccaggttaaccaaggcatctagtttaccttcaagcttcttagtctcacttgatgaaatgaattcgtggctacttcatgcactcctctaatgacaatagcatcatttctggcactgaattgctgggagttggaagccatcttctcaattaaatttctagcttcagcaggggttatgtctccaagggctccaccactggcagcatctatcatacttctctccatgttgctgagtccttcataaaaatattggaggagaagctgctctgaaatctggtggtgagggcaactagcacataatttn

SEQ ID NO: 303226 - DNA, 386 bp, Glycine max
tgcaaactttgtgaactatatatttcaagacaaatagaattggagctcaaaagacaatggcacttgagacttatgctacgtatgaaagattgaagtatatcatggtattttttaaaattgtttacattagtataaatatatttttcctattaaatcaatattaaaatattgttacttttttttatttgtaggattcaaagataagtattgaggctcacagtaattcatagagattgtttgactaactgaactagacctcataagtgatatatatatatatatatatatatatatatatctatatatatctatatgtatatatatatatatatatatatgtatataatcatatcttgtctttagttgacaacacccttgcatgatag

SEQ ID NO: 303227 - DNA, 443 bp, Glycine max
ttaagcttgcaacggtatgaaataataacacacacaggagttaatattctcatttatgtgttaaaaaaactatgagtagtagataaaaataaaaatgtatgttgttattcaagaaaaagaaaagctaagtgtggaaaggctagtaacagagctggagtaaaaagaaaaaggttaatctatggatgaatgctctcctataacttacgtttgcagcctacaaaaaccatgatttgtttgcagcctagcctcattacaagcctagtcaaagtccttcggattcaagtttgtgtgttcttgactgtatggtatgagatgaagtgcacagattgagacttatgttggttgttgactgatggatagcctatacactactgcttgagtgaaataatagctgtgaggctttggttaataatcctgtcttgatatctatcattcctactaac

SEQ ID NO: 303228 - DNA, 384 bp, Glycine max
  unsure (1)..(384): unsure at all n locations
agctttttgaaaaaccaaaaggcacatccaaaacatccaaccaatatcaaacttttacaccaccaagctatcagcaaatatagcacctaataattagaacttgataaaaaataaataagaattctgcacaaaggggtatactaagcccaactacatcaagatatgttcatcaaagtgaagaggacatacaagaggtccactactcatatatgatgacatggaaggcatttttagcctagccttaagccaaaacaactcctaaccttaatcatgtcaatcacctcagcaaaatccaactatgctcaatggaaacatattatgattcaatgttaacaatagcttccagcactccgagactntgtttccatgtgccaaatcatagag

SEQ ID NO: 303229 - DNA, 424 bp, Glycine max
caattgatggccaaaacttatgttaaagataattattctttgttttgtcaccccattcaaaagatgtccaaattctttattgttctcattgtcaatccgtcagcttatcctcaagcgatccatgtatgcagaaggccgtttatacagtgaatttaagatggcttacgttctaacctgcctcatcaacctgtcaaccattcacaatgagagtgctagtttaaatattataaaataaaaaatataaaaaatctttcgaagaggctaaataattgttgttactaaaccttataaaaacatcataaatggttcaaaactttcaaatgagtctgaaaacatagggacatgtcataatttttcaaaatagatgaaacgcgaaagtgatcctataacagtgtaaccaaacatgagatacacatctccaccg

SEQ ID NO: 303230 - DNA, 220 bp, Glycine max
gagtcgagaatactctattatttatttggacaagtttgaatatgatgtacaagaaaaatgaatgtgaacctttttcccctttgaaagacttgtaaaaaaaaatgttttaaaaatacttttaattaatatttgaattttttttatctcttattagcatatatgtgacgggtagacggtgtcacaagtggtacctcgacaccggcgcaagcaaccacatgtg

SEQ ID NO: 303231 - DNA, 436 bp, Glycine max
tccaacggtaagatataataacacacacaggagttaatatgttcaacattgtgttaaaaaaactataagtagtaaataaaaataaaaatgtatgttgttattcaagaaaaagaaaagctaagtgtggaaaggcaagtaacagagctggagtaaaaagaaaaaggttaatctatggatgaatgctctcctataacttaagtttgcagcctaaaaaaaccatgatttgtttgcagcctagcctcattacaagcctagtaaaagtccttcggattcaagtttgtgtgttcttgactgtatggtatgagatgaagtgcaaagattgagacttatgttggttgttgactgatggatagcctaaacactagtgcttgagtgaaatactagctgtgaggctttggttaataatccttccttgatatctatcattcctactaac

SEQ ID NO: 303232 - DNA, 212 bp, Glycine max
  unsure (1)..(212): unsure at all n locations
actaattgtgattgtgatagacaaaagagagagccttgtgcttcacgcactgacttacttttgtacatgtttgattattcttgctgatatctgatactctactntattgccatgtattcgcatcatctagaaccataatctacctcttggtttgactcaccatttgtgtctacctagctcttgtattaagatggcaaccatacgaaagtttc

SEQ ID NO: 303233 - DNA, 434 bp, Glycine max
  unsure (1)..(434): unsure at all n locations
ctagcacacttcagagatcttcgaaaagatcccaacggtcagatcattgacaagtgtcntttgaagttgcagaccaaatttcgagaagatccaacagttaacaaaggctgggcagcgtttttaccgagacagcttcatgtagttttctctagaagcttcattaagaggcttcctccaaaagcttcattaagaggcttctagaacactccagacatcttctcaaagatcccaacggtcagatcatggaaaaatatcttgtgaagttgcagaccaaatttggaaaagatccaacggttaacgaacactgggcatcgtttttaccgaggcagctacatgtagctntctctagaagcttcattaagaggcttcctccagaagcttcctcgtggcttctttgagaagctttctcgagagggcttcttgagaagctagan

SEQ ID NO: 303234 - DNA, 430 bp, Glycine max
  unsure (1)..(430): unsure at all n locations
atacccttcacttgcaagaaccacttctcataacaacatcactcactcttctgctagtgtccacaacaatctacttagtccaaaagaaattcataatactggggcatctagttcgtctaaactttggcatcaaagactaggccatcctaacaaggatgcactagcaattgtactaaataaatgtaatataccctttatcaataaaactagcagcgatttttgtaattcttgctctatagccaaatctcacaaactaccctcttatccctcttctactgtatatactgcacctcttgaattagtattctttgatgtttgggggccctctttagatagtcatcttgtggattcttgtatctcctaacttgtgttgatgcctattccatattcacctggatttatctgcttaatcataaatctgaccgttctn

SEQ ID NO: 303235 - DNA, 164 bp, Glycine max
  unsure (1)..(164): unsure at all n locations
gcatctgtgcggtatttcacaccgcatatggtgcactctcagtacaatctgctctgatgccgcatagttaagccagccccgacacccgccaacacccgctgacgcgaaccccttgcggncgcatctaattaacttcgataatgatgctatacaagtttatcgtg

SEQ ID NO: 303236 - DNA, 399 bp, Glycine max
ttttctcggcgttggggagattcatatatacggtcgaacctgcaccggtgtcctctgctcgcatcctctttccagggatattagggagagaaccgtgttactcttattacagctcacctgatgtagaatgttgcacaacggtgagctggaacaaccaaactggttcccaaagacccgaataatctgttatctgtcttattattaaagaaaacatgcacacgcgcctaaagcgcttacttgtataggtgccttgattcccctgaatttggctccatctaatggagtgataatatgcgcctaaaattatgctgttattcgaacttagatttaacattatttctttctttaaggcgttagctataagtatatcgctaagattattcccttttgtttggcccg

SEQ ID NO: 303237 - DNA, 484 bp, Glycine max
  unsure (1)..(484): unsure at all n locations
agagtgggtttgtgcttcgctcntcgncacactagagacactaaaacttatcgcccttacgcactttaccttatttagaagaatctttgtgtgtattgtgaatacagttactgcgataaggtgacattggcttaggcattgactgaaagaagatcttggagaaacgaaatgagagtgcctacaatttagctcatgcaactctatttcatgctgatgcacgagacatagtatattatactttgatagcttcttctcctataactggacatgagatatgactatcgcatcgacgtcatatcagactcgcacaaaatggttcacacagacatgatcactatcttgatgagaaaaaggataccgagctctgccgacagtgactataacatgtacactactcatgccttctagcactcatgattatatatactcatgccctttgcacaagcgcaagccttaggattggagcgatccttgatgcatagat

SEQ ID NO: 303238 - DNA, 374 bp, Glycine max
gtgaagaattcagcttgacatccatttatagtggtcacagctgatgataaagcagaggtatgtacaaccttgacatgctttgtgttcataaaggagttctgcctcaattggttagatggcatggttgcttgtaattttctgtctgcatatgaaggaagtttgagttatatgctttattgtcccaataaaatggctgtcattgctagtaattaagatgcttcatggtagtatagattggtactatattgtctcccacatacaaatatttaatctgagaagtacgttgtggttagatgctagtgtatacaaaagtcagttccgagctctggtattttctttgttcttgcgactgttacctatctgtgtaatactag

SEQ ID NO: 303239 - DNA, 354 bp, Glycine max
  unsure (1)..(354): unsure at all n locations
agcttattgtcgtttgaatttgctcanagcttctgttctgaatttcgagcatctncatatactacgggaaacaatcggacatccgagtaaaaaggttttgctgcttgaattttctaagaggttatgatttcaattctgagcgtctcgatatattacgagactcaatcacgcatccgagtaaaaagttattgtcgttagatttttcttacagcttctatttccgattatgagcgtctcgatatattacgagattcattcggacatccgagtaaaaagctattgtcgctcgattctgctcaaagcttctgttatgaatttcgagtgtctccatatactacnggacacaatcggaca

SEQ ID NO: 303240 - DNA, 430 bp, Glycine max
  unsure (1)..(430): unsure at all n locations
ntgagcaatatcaaacgacaataactgtctactctgatgtccgattgtgtcccgtagtatatcgagacgctcaaaatttagaacacaagctctgcgcaaaatcaaacgacaataactttttactcagatgtccgattgtgtcccacagtatatcgaggcgctcgaaatttataacaaaagctctgagcaaaatcaaacgacaataacatcttactcgaatgtctgattgcgtcccatagtatatcgagatgctcgaaatttaaaacagaagctctgagcaaaatcaaacgacaataactttttactctgatgtccgaatgagtcctgtaatatatcgagacgttggaaattcaaaacagaagctctgagctaaatcaaacgacaataactttttactcgaatgttcgattgtgtcccgtaaataacgaag

SEQ ID NO: 303241 - DNA, 315 bp, Glycine max
  unsure (1)..(315): unsure at all n locations
agcttgatatgaggaagtgttgaagggtgaaactgtctgcttttattgctgaccacacagcggtacctggagatatgtcgcgggggtcaggagacctcggggacgtcaggtggggtgctattgcccaaaaccaagcttgaccaatccngacccaacccgggcatagtcggtcactgagaacctgtgatgtacctaagcacgcgagctcctggcagtcaacagatacaacgaacaaagaccacacagcaaggaggcttgtggtggctggccacctgcgaaacttgattgatatgtgagatatggtctctggcaatc

SEQ ID NO: 303242 - DNA, 428 bp, Glycine max
tgagatgaggaagtgttgaagggtgaaacttcctgcttttattgttgaccacagagtggtacctggagatatgtcgcgggggtcaggacaccttggggacgtcaggtggggtgctattgcccaaaaccaagcttgaccaatcccgacccaacccgggcatagtcggtcagtgagaacctgtgatgtacctaagcaggcgatctcctggcagtcaacacataaaaggaaaacaagaccacaaagcaaggaggcttgtggtggctggccagctgtgaattttgtgtaatatgtggatggcggcctctggtaatcgattacaaggcttaaaattgaggacaggaggctaagatggtctctggtaatcgattaccaaggggtgtaatcgattaccaggcttgaaaacgaagccacgaaacttacggagcctc

SEQ ID NO: 303243 - DNA, 360 bp, Glycine max
cagcttttctgattaagttcaacaagccatcactgctttattctccttcgattaactatatgcaaccgcacaacattatcttctgatcgcatggatctgatggttatatggcgccaaacaagtccctttcgcattcagatcctgagagtttttctaattcttgtggcggtgcgtttaacaaccgcggtggtggctggtagcactgcacccgcggaagaagccggggtcgtggttggcctgctaactctcacgtgcaagtctgcctgaagtatggtcacactacctcactcctgtattatcgacacgagcaacattatcaaccacacccaactctcgtcgctcaggatctactactatgcg

SEQ ID NO: 303244 - DNA, 432 bp, Glycine max
tcgcaagtttgaagggtattattattatggcacagttttatcacgcatggtcgcctgaagctgctcttgaatggggagggtgtgtcttctgttttggagcacatagatccttttctctacaagtgcagatcagttcacacccacaagagaagaacaaggtacgcaggttcttctgccagaatttactatgcatcaacatcatctctgagtagcaaaagccaccgttgtaatgcggaggcacgtcacacttctggcaatgggagtgttcatgatgaatatgatgacattgatgatgatgaggatgacgatgatgacgaggaggacgacgaggatgtgtttgacccacatggcttgtcttgtatccggagtttggtgttggacattgcttacaggccactttcatctcttacacaatcgcatcttttttaacta

SEQ ID NO: 303245 - DNA, 391 bp, Glycine max
  unsure (1)..(391): unsure at all n locations
agctttgttctatccctangcataaaacccattaggtgttcctctccatttctaagttcaaaagcatttcccaatgacaattcaaaccttcaagcaaagggtgatcaagccaaaacaagcattaatgcatagaagagaacacttgataatgaacaataaacatagattaataatcaaaatgtaaacattacgatgggctcacttacatcaaccccaaaatgggtaaatctaactacataactaccagaagaaaagaagaaaatagatgaaagagatgatgaaaaatggcaagagagagcttccncgctgcaacctacaaccctagatagttctcctaaccaaatctttcttcaattcgcatccttggaacttanatatggccaaacacact

SEQ ID NO: 303246 - DNA, 429 bp, Glycine max
  unsure (1)..(429): unsure at all n locations
tgtcntgatcattttgctcaatttctttgctttcttgttcataagcttttcctcttttcttctcgagcaatagcctctgcttttctttatctcgatagttatcgcacctaatatgcagttaatcatctatgtgtggtgattctctggttcaagcttgattcgtgatatggtatcagagttcttccattgaagagctctgctgcacaatcaagagaagttttcaaagcaatttatcctttcttcacctctgttttgagttttgtaacatctcaattttcgtaaactagattaaaaggaattgttatttataaataaatagaattctaaaaataatgatgagattttataaataaataaataacgagatataattattaattaaaataataattcgagagaaaataaaaaggatattttattcatctgttt

SEQ ID NO: 303247 - DNA, 405 bp, Glycine max
aagcttgcttgattcgctagagcttagctacacacgcgcctctaatagctgaacggacctccctgagaagctagagcatatctgcgcacacgcctctaatgactaagctcgcctccttgagatgagaagctggaggttaactagacacatcccctataatagctaagctcaccccatgccttaacacaagaaagtactataatgtccctactacaaagactgctcaaaatgccctgaaatacaaggctaataccatatactactattatgagcctgatacaacgcccgaacgatggaaaaacctattgtaatatttacaaagaagagaggacccagccttggcacatgggctaaataatatacccttacgttcatgataaacctagagccttctgttgcagctct

SEQ ID NO: 303248 - DNA, 306 bp, Glycine max
agcttcaccttctggtcctcctcatagttgttgcatgagaaaacatgctctattttcatctcccactccaagtaggcctccggatcattctttcctttaaatggaggaatgttgagtctaataccatcaattcggctttgtctacgaacaccatcattccctcttctcctcctttcttcttcattatgatctctattctccatttgatacaacctctcatggagcgcatcatctcgttgtttcattaacctctccaaatgttgcatcaaagcttgcatctggaattgcgaaagccccactccatca

SEQ ID NO: 303249 - DNA, 419 bp, Glycine max
  unsure (1)..(419): unsure at all n locations
gtgcacatccacaatgcgcgcataaacccaccatcccctgttgcccacctccaactgagctcacgtactcccacgtagcccatctcctcgtttctctcaacaccgggtccccatcaatcctctcaagcttacacaacatccaagcaaaacaacgttcaaacagcacaagctatcacagccaagcaaaacagagcaaaggcagaaaactctgctcaacacatgaaccaaaatcacagcttttctcacgtaaagaccacagtaacaattccttcgatccaattcgttaaccgttggatcgactccaaaattttactggaagtctatagtgtataagcctgcattttgaccgttgggatatactagcaaacatacagaactcattctgcactagactntccacagccaaccacacacaagca

SEQ ID NO: 303250 - DNA, 329 bp, Glycine max
  unsure (1)..(329): unsure at all n locations
agcttcataatgacaatatcttggaccgttgtcgccattctagagctcaattccactttccccctccgtcaaacccacttgtcgggtcctttgtgatttccaaccctatgatccctatcaaatgcctctcatcgaaggacatggtcattcgacacaacaaaggcttctactgttggaaaagagaacgttatacgaattaattgagagaaatagacgagagaatatctgaaagacgactagcttttatgacttgagaaatttcttggtttggctttctttctttggctttcnttggttcacttacaaatgacaatctttcccccttttat

SEQ ID NO: 303251 - DNA, 437 bp, Glycine max
tgcttgagaaacttccttgagaaacttgtttgagaagctttcttgataagctagagcttagctacacacccctctaatagctaagctcacctccttgagaagctagagcttagctacacacacccctctaatagctaagctcgcctccttgagatgagaagctagaggttaactatacacatcccctataatagctaagctcaccccatgccaaaatacaagaaaatacaaaaatgtccctactacaaagactgctcaaaatgccctgaaatacaaggctaaaaccatatactaatataatagccaaaatacaaggcccaaaagaaggaaaaacctattgtaatatttacaaagaagagtggacccaaccttggcccatgggctaaaaaatctacccttaggttcatgagaaacctagagccttctttagcagctct

SEQ ID NO: 303252 - DNA, 382 bp, Glycine max
  unsure (1)..(382): unsure at all n locations
agcttctatattatactacacgttttactgactggaagccagagttagtcattaacttatgtaaggtgaagaaagcatcgcatttgtgttcccttgactcagaaagcgagatttgatcccgtaagctttcacgaagatccgcaagaccattattaattaaaaaagaaaacatattgagattcttgatatgcaaaattgatgggggcagttcattcaaacctgattgtactaaaaacaacgctcgaagagattgtggccaagtgttgctgctaaggctcttaagcgatgagcacccgctcacatttaacatctcaagcttcgggagagagcanatngattcatcaacataacgcaagctttcacaaccacgcatacttacata

SEQ ID NO: 303253 - DNA, 433 bp, Glycine max
taaatattttggggtgttctgcctttagggtgttttctacatgagtacaacgataccttctttcttttactatatatcttcccttttatataccttttatatacatttttccctttatgctttctgaccttttactatgtgtggacaccttaatgtgcttctctttatcctagataacagagagaaaaaatggagcactggcagacctggtgagtggttacatttaattttgccaaaaaaacaagtgatgttaccattagcttttcttccttatttttatctctgattttatcatttatcatgtaggatgatgttggttgttttaagtactatgccaagcttgtacgaagattgctaattgcagttgtgttcctagaaaacctgtggaatattgatttggttctttattctatatcacgttgtgattctgatt

SEQ ID NO: 303254 - DNA, 312 bp, Glycine max
tgaagagtcatcctccaatgaaaagaatgttggcggcataaacttctcaactatccatgtgcctgatacattttctatgactaggcctgatccattaatgagtcttgtgcatgaacaggaagcagtcccaccaatgaaatcacaactagatgcttatcttgaggagaacaatacttatatctctaataatgaaaactccacttttagtgccttggagtggtggacgaataatagtctcaaatatcaagattctatccagatggcaagagatatactagctgctctaatgtcaccagctgtatcacaatctac

SEQ ID NO: 303255 - DNA, 435 bp, Glycine max
tcaacctgttaacttgctttccatcaagatgattcgcttaagttaattatttctgtttgttcgaccaaaactatgttgctaggttttgataaaccctaagttaatattaattaataattttgcgcttcaaaaaattagaaaagaaattcggcgatccaaaatttctagatacgcatgctaatctgactaaagataagagtgtgttgtgcattactatcagttgaagacaccaacactatggagtaatgcgactttttgacttgtgaaattgctccgtaaattttattcattctctcccttttttgcggctatcacaatggataagagacacacattaaaactcctaaattagagattcctataaaattctcaaccaagagaaaaattatcctaaaaaagaaaataagttatacttacaatgtaatacaattagct

SEQ ID NO: 303256 - DNA, 169 bp, Glycine max
  unsure (1)..(169): unsure at all n locations
cgcatctgtgcggtatttcacaccgcatatggtgcactctcagtacaatctgctctgatagccgcatattaagccaagcccgacacccgccaacacccgctgacgcgaaccccttgcggncggatnaatataacttcgtataagtgtgctcttcgaaattattacgact

SEQ ID NO: 303257 - DNA, 320 bp, Glycine max
agcttgtctccttacttgtggcttttgccttggcgtctgcactagctgagcccttcgccaattcgctacagccttggtgtaacgctgccacgagaccactttacatagctgcaaaacaagaataaaatcatattgcatactctctccaaaacagtaaaatgagtatgaacaaataatatattattctgttatctaatcacaattgactgtgaatgatacgactcttagccactataataactactgtaaaaatcataccaaacatgatttcttatttgtcgacaatataaatcctctcactaattaaactcactagcacc

SEQ ID NO: 303258 - DNA, 290 bp, Glycine max
tagcagaccaacttttgtgatcactttctttattttaacaagaattcttcgtagatgattgtagagatgacatgaactacgcgctgcatatttgcatgatctaactttgtctgttctttgttggaaaaaaagtgtttctgtgttatgaaaatgtggaatctctcaagtttatgaagactttcttaaaaacatttggtctcctattatcatgccatttgtgtactgatattgtgatgcgaacaacgtgtaaatatctgatgccttgttgtgtttatcatgtaaataaaata

SEQ ID NO: 303259 - DNA, 373 bp, Glycine max
atgtatggggacaacatgaaggatttaaaataagtggccgaatgcgattctaggcctaggaacccaagcttttaatttcaatacaaggaagcatgacttatgcctaggaatctaagtttggttttgaatgtaaaaaggcatgaatattatgacatgtttgagaggtttttattagaatttaaatttggttgccccatgaggaataccttgcacctaggtaccatggaaaatacctttcaacggtatgtatatatgcgaatatatggcataaaaataccttgcaaagtgtgaatataatgcataaaaataccttgcacagtgtgaatgtatagcagataatgcatttcaaaatctgtatatgtaggatatgtag

SEQ ID NO: 303260 - DNA, 357 bp, Glycine max
tgataaacgagagcttagcgccacgctcctataatagctacgctcaccgacttcagagacgatgagcttagctactcacagactgactttagattgactcgccaactcttcatggtacgctaggagatttgtattcacgaatcctatgttagctatgctgacccaatgcccaagtatcagaatcaacattcatgtccctactactaagactgctcagaatgccctgacatacaaggctttaaccatatactactataatagcgcaaatactgggcccttctcaaggaccttcctactgtgatatttacatagatgagtggaccctaccttggcccatgggctgattaccataccctt

SEQ ID NO: 303261 - DNA, 217 bp, Glycine max
  unsure (1)..(217): unsure at all n locations
atcttgttctgtcacgctaagcgcaattatctctgtgtttttctatttgttggaatcgggcttaccgagcctgctcgctaagctagtgttgtccagtagagtagtcgcacttggcgccccttgccgcactaagcgcacatccttatctgtctgacaaattatggaattgggcttaacgagcctgctcactaanccaattctacagaaaaaaaattgg

SEQ ID NO: 303262 - DNA, 288 bp, Glycine max
tctgttcctcacactcctaaataatgcatagatacatgcacattcaacataccttgtattatattggaatacctaagactgacaatgccatgctaaatttaggagcttcttgtactgttatactgataagccatcattatcttctatatactaaaccctttctgcaccatcttaattattgaatggcattaattgtcaatcaattatgcagttctataatatgggctcatttatctaatatgatgtgttcaatctaacttcaggaattaatgaaacattgcgcttaat

SEQ ID NO: 303263 - DNA, 222 bp, Glycine max
tttttctggtgggacatcttgacttgctgtggagtgtgacattcaccacatattctgccttcttctatttttatatcgcgaatgcctctaacagcccctttctcaatgattctcttcatgcctcttaagtgcacatgtcccgatctttgacgccatattttgacttcatcctctgtgcacaatacacatgcggaagactgactggccccttcatgcgtccat

SEQ ID NO: 303264 - DNA, 422 bp, Glycine max
tagggttaaagctcacgattgtacgtgtttatgcttcaattgttagccgtggctatacgagacatcatgccaaacaaagtcaagttaacgataactcgcctgtgctttttcttccatgctatatgtagcaaagccattgatcctgtcaagtttgatgagttggaaaatgaggctgcaattatattgtgccagttggatatgtatcttccccctgctttctttgacattcatgactcacttgattgtgcatctagtcagagaaatcacatgttgtggtcctatatatctacggtggatgtacccagttgagcgatacatgaagatcttcaaagggtatacaaagaatctatatcgtccagaagcatctattgttgagaggtacattgcagaataagccatcgaattatgttagaatacttaat

SEQ ID NO: 303265 - DNA, 385 bp, Glycine max
agcttctaacgggcatcacttcatcttggttgcgatcgactactttaccaaataggtcgaagccgcctcatactctatcgtcacgaggaatgtggttgctacgttcatcaaaagggagataatctattggtatggatcgcccaggaagattatcacaaacaatggcaccaatctgaataacaaaatgatgaaagaaatgtgcgacgagttcaagatccagcacggcaattccacgccttactagcctaagatgaatggggcagcacaggcggccaacaagaatatcaagaagattatctacaacatgactctgtcatataacgattggcatgaaattcttcctttcatgctgcatggctatcgaacctcggtacacacatcaatc

SEQ ID NO: 303266 - DNA, 433 bp, Glycine max
tcctcgtggcttctttgagaagctttcacaagaggcttctttgagaagctacatccttatctatccacccctctattaactaaattaacttccttaaaaataattacggatgaaaataacgcaacaaataatcaaacatcaaacataattactaataatatatagatatatatatatcagggtgttacaactctcccacccttttagaaatttcatcctcgaaatttaccttactcaaacaaggatgggtgagcttctcgcatctgaatttctaattcccacatggcatcttctcctgatgcacctccccatatcaccttgaccaacgaaatctctttccctcttaggtgttttgttcgccaatcctcgatcctcaaaggcaatatttcatatgtcaaattctccttcacttgtacatcatccaattcaatca

SEQ ID NO: 303267 - DNA, 319 bp, Glycine max
  unsure (1)..(319): unsure at all n locations
ttcttattntcattccgggaatttgatcacgaaaaacaagcctgaagtgacaggacaaagacgtgagtatctagcaccagcttctatgagaacttctncaacaaacagtggtcttcttcttgcaactactgctcttcctcctgcgaatgacagcaccatggaagagttgcaacgcgggcattccagctgcaattgctcactgcaaaaattctattctcaaacaagagaagctcagctgctgatacaaacctggcacactttttttttttcttgttaccacctgcgcctcttattgccataccctcctcattttatctcc

SEQ ID NO: 303268 - DNA, 431 bp, Glycine max
  unsure (1)..(431): unsure at all n locations
taactaanattaaatatattaaaagatttggcatatactatcacttaaacgttgaaattacctccattagtatagttttcgttcaacagaaattaaactagtaatatagtcattatagatctacaatgagttctttggatttttgttttagaatattaggatttaaaaccaactaattaaataacaatcataggtttcatttacaatttatatatgtaaacaaattaattattagatcaaaattaattgtcataaaatttattatataaattcagatgtactttgaatatacataagacattgtagtcttatatatagcgacattaattattttataacataattagcatattagttcggttgattagagcgaatgcaaaagtcacaggttcgattcctgcattacccattaattctagattcacttatga

SEQ ID NO: 303269 - DNA, 313 bp, Glycine max
agcttgtcaaataatgtctgacactatttatcaaacaggattgccactcaaacgctcccacagccttacatcttatatttttgcgcggtgtcaaagtgaacatctaattagtttatcttttgttatttattgtatcgctgctgagaacaatttgaattacaatacaataattctatttcctccacatatctattgtctctcttctctcctctgttttttataatttcctcctcacaaccaacaatcggtatcaagagctctattcttacgggacctgcaccatggaacgcgatgcgagagaattatgatcttt

SEQ ID NO: 303270 - DNA, 304 bp, Glycine max
tgcatggctcactaagccttagtctatgacagagagctatttgtgcttagcgagactcactcgcttagcgcgacacactaaacaggcttagcgccatcaggcgcttagcccaaattgactactggaacttaattggcttagcgagcaagctcgctaagcccaattccaaaatagagaagaaatagcacttagcgagacttactcgcttaacgcatgaacaaaaactcagaaaactaaattgctttcggcttagcgagactgacttgcttagcccaggcttattcactaaaagaggttgggtggc

SEQ ID NO: 303271 - DNA, 139 bp, Glycine max
tgtattctagctttgtccgcgtgctcaaagctttggtccaacggattaaagcgttgccttatcttaatgacttatttttgactgatgaatgactcttggccggccatggaaatcctatacatcaagcccacagttggca

SEQ ID NO: 303272 - DNA, 416 bp, Glycine max
tgtgcctctagtagtaaggtgattgcttctttatttgttgttaaaaaaataatgaagaggagcaacacaataatgagcccatgatacataatgaacctattatggaagaaccacaagaagtaacattaaggaggtctcaaagagaaaggagaccagctatttcgaatgactatgtggtatacctatataaaacaaaaacaaacttaagcattaatgataataatctagtttcattttcacaagctataagatgtgataattgtgagaagtggttaaatgtcatgaaagaaaagataaattccataaaatataatggtgtttaggaccttgtagaattgccaaagggttgtagagatttggttgtcagtgggtcttcaagactaaatgtgactctcatggcaaccttgagtgttaca

SEQ ID NO: 303273 - DNA, 397 bp, Glycine max
tagaagaagtcagtgactatatttcggtgttgaagatgcaagtacaagccatgaaggctctcgtcgatgtccttgccactagtgcttcgtcgccagctccgatcggtttgagcaaatgtaatcacaaaaatattgtgtacttcactactttatatggtcatatttatcttaattgaactttaatttctttctatcctatacacattggatatgttcaatcataatttacattatgccttcttcacattcagcataatagatgcaataaacaggagtgatatttgatgaaataaactcattgccctaatgattaacgaaatgtgtacatttgatgccaagatgtatacatctacggatattatatataaagtggccctacataatagaaatgatatag

SEQ ID NO: 303274 - DNA, 434 bp, Glycine max
tacaagaaaaccaaacaatgccttgatcatcttaaacgagcaaagaattcaagaattatgagaatcaatcaaaatcaattgtgataatcccaatggtggcactcaaagcatccaagaatcgcacaactcacatggttaaagcaacattcaagagttctcaagagttatgctacatccactaaccacaatcaatgcatcatccaaccattctactcactcattagtgcatccacacatatgattgcaagagaaactttccatattattcccaacatgcataagtgttctcacaagctctaaacctcaaaccacatgtcataacattacaaaataaaagatgaacagtaaatacaccacaattgctaagaaaaataaaacataaaactaccacatgatgatattaatatgagatgatgttgttattgatgactatg

SEQ ID NO: 303275 - DNA, 194 bp, Glycine max
gcttaatcactgctaaagcaaaatctaacccgattgtcacactataacctcagctaaataaaaaaaaggccaaataataataaaataatcaaaatatctctgacaaaaaataaaatcaaaaatcacaaaaatcaatcggacattcttctttgaaacgttccttgaatgaattgactaataaccaaagtgaaact

SEQ ID NO: 303276 - DNA, 438 bp, Glycine max
gtgagccataaaaaaggagaaggacaatttccaatcatttatgaagcaaaaaaaaggagagaaggaaaatttccaatcaaaggaaaaaagagaggacaggaaattcccaatcaaagagtgggagaaagcaaaaagaaaagaaaggaaattcccaatcaaagaatgggagaaagaaaaaagagaaggagaagaaggaaagaaagctcctgatcaaggatcgaaagaaaacagaagaaatgtgcagagaggtctctggaccagacaatatctgaacaaatacggaattgtcaccaaatgaacaaaagaaagataaggaaaccataacctaaaagtggtcttctccctttgattaccaaccaaaatcctgtgcgtcggtgacttgttcgcctcgcgtcaaacaaaaacagataaagaaaaagccaacataaaatcaaaagc

SEQ ID NO: 303277 - DNA, 406 bp, Glycine max
  unsure (1)..(406): unsure at all n locations
cttatgagagcaaaattgcctcaatcatttccaaatatgcatgtgaattaggaagcatcaacaagaatcaagccaaggctattgtgcaagaaatcaatggggcaaaacacaccaaatgattatgatgatggatggctcacattctcacaaaggtaaactcatcactttcaaattgagctttcaaaactatcatgacatgaagaggagaatcaaggatttcaagtcacaaaatgtcaagaacttttattttcaaaacaattacccatttcttgaacatatcctataattcaaagaaaaacatgcaaagtcgtacatgcacacagaattgaccctcaatattaaactagaaatccgacgaaactaacaacagtaacaaattaacacaactaacatattatcaaaaccn

SEQ ID NO: 303278 - DNA, 434 bp, Glycine max
  unsure (1)..(434): unsure at all n locations
tggatttccttttagtagggaatctatccttcctaagatggagcctaacccaatcaccctcattaagaattagctcttttcttcctctattgcctttagttgagtacaccgttgttcggttctctatttagttcttaaccctctcatgcaacttctttacaaactcttacctagattccccttctttatgtataaaaaaagtgtccagtggaaggggaatgaggtctaacggcgttaggggatggaacccatagacaacctcaaaaggggattgcttggtggttctatgaacccccctgttgtatgaaaattctacatgaggaagatcctcatcccaagacttatggttgcctttcagaagagcccttanaagggtggataaagacctattcactacctttgtttgcccatcagtttgtggatgacaagtggta

SEQ ID NO: 303279 - DNA, 309 bp, Glycine max
gctttgacttgagtcatcaagagattatcaatatgtgaccatggcatgagtttccagaacatcaatcatctttgaatcatctatctttcaatcttccttcaacattcttcaatcaatcttttcaactctttctacagaatcttcggattcatcttctcttcatcctctcttaaggtcttgttcaatactttctctttcacgaaaagttttttgataaacaacttgcgctattcatctttctcattctcttctcctccatgtcggccttcatctgcctttgcaccccccgaattcttctgcgtctctctc

SEQ ID NO: 303280 - DNA, 426 bp, Glycine max
tcacagatgaccagtccatttatcatcccaccactcactcttacgtatgagttggagggtagacccatgcatatgtttagctcttggcttctattccctatgtcaataatcgcgaaaaagaagtttactacaggaaaaactacattaaaagctctctattccgtctagtctgatattacgtaaccagtccatttcgtatgtctttcgaagcgaggggccgggtttccttgtttcctttcggaggacatggtacatgccctgcaagaaaatagtctttataataataattataataataagaagtcctgttctctctcggcagctaccatcggatcatcggagttgggcagttacatctttcattcaataaccagtggttgaaggttgattcccaacaagagcaacatgttcaataagatgggagct

SEQ ID NO: 303281 - DNA, 376 bp, Glycine max
  unsure (1)..(376): unsure at all n locations
tcttctgttgcattatgctatgaatgtctttacatgttataacctcgctgacatcttttgccttgactggaattgccatgacaggtttattgatactggctttgatgtataggacttgatattgtgttgcggcatgctattcctattgaactaactcaccatccttcacttgccaacttgtgatgacattagttgttggatcacctatgatgtcttgcatacaagggtaagcatatatgcttgctgatggcataagcatgaatcctattcaagaaaaagaccttcatcttgactctttcatacaagacagggaacttgactcggatatgctttctgtttgtaacgtatgtctgacacaaaagaaatgctcgttgcn

SEQ ID NO: 303282 - DNA, 428 bp, Glycine max
ctgttgcattctactaatatatggagttggtttctgctttttctgagaataacaattggttgaccacaacaacgctagaggcggtaaaggacaacggtctttcaaataaacctgttatgcgtgaacaaacattattaactcaaatgaaccagggaagtgattgcctaattcttagactaactaccttcaatgtacttgaacaaaatgatttccaaacacatgaccgaaacatatcatgcggtgcacagaagaatcgggtggtggttgaattttaagaggaaaaaatgtcatgctttgttgtagggacaacgatacaaggattacgttataccatgatgcaatgacatatctcatctccattatatccatccacttgttcacactaacctgaatcaagcaaacatacacatctaagttatttaaacttt

SEQ ID NO: 303283 - DNA, 398 bp, Glycine max
  unsure (1)..(398): unsure at all n locations
tttttttattaattccaatcttattcctcactgaatgcgaaatgaatcactaaatgggggtataaagctttttgtggacaagcactctaaccttagggttcgcgatcttttgatgcatgtgtatttcaagttgaatggattatagtcttgtcaaaatttggatgtgctaattacatgtggtgcttgagtctaaacacaaacctatacgcatttggtaaggctaagtgtttttctttgagagatttctatcaccatgatacattcttaattttgacttgactacttgtccactttgcattttgtgatcatgtgttcatggattgcttgttaccttgaaaccattcttccattttccatctctctaatttntgtgcattggtaggatccattgaacaatg

SEQ ID NO: 303284 - DNA, 432 bp, Glycine max
  unsure (1)..(432): unsure at all n locations
tatggattccaatattaccccaaaagagagcatgtttcttanaagttactttaagggatgtcccactagaagctttcaaggctatgcttaactttttatatgatgggcaattgaatgacaaagtaatagattctggtgctttgttgctccaactccttctaagtttctcagctgtgatatgacctgctagaatagacattcctccaaatagcacagcgataacctatgagatttaatgtttcaataaaaacacaagtcaatattaaagttttaattaaacttcaaaaaatttatcgattacaaatcctagcagactttcttccaagagtaaaattataggcttaaaggagaaaaaaaatggaaataaataaattaataaaaaaattgataattacgtgatttaagagacccgtagctaacctgagttgaatg

SEQ ID NO: 303285 - DNA, 383 bp, Glycine max
ccttcgacctaacacgggcatgtttctgtctaagcccggattcaaggcgggttgcagcaccggctccgcttccctaactgtactagaggcggatgccgtggctttatcctctatggctatctggagttttagcatgacctccgaaatggaagccatttgatctttcaaggccgatagatcggtcttcatctgttcctgcacgccctcttcattatacatttttttggatcgagtgttataggggcgccttggcgttatcgtatttatgatgaaactcctaaagatatgaacgacggtgagcatgcctccgaaacatgagtatgagaatggatgatcggcgctcttggatacaccccaacgtttgtacataacgagaagagtct

SEQ ID NO: 303286 - DNA, 350 bp, Glycine max
ctgtatctcaaaaacgttcaactaagatgtataaatgttatttacggactctctgcatgacatgtgagagtgccagatgatgttgtgctttatgagcatgatactcactcctatctctgaatctatggtccagctcctaccacattcgatcttgtgatctgcattatacattacatattgagagatatcttaattagatatacatgatagttgcatgatgtgccaagaaaagagagaatcatggaagttgtgacttacatgccattatctgataaggttgattatctctgaccatctgactgccaatgataacgatggttgatctgaccatttaaaatcaattattggtg

SEQ ID NO: 303287 - DNA, 347 bp, Glycine max
agctttaactactttgtgataccaacacagactacacttatgtttaaattaaaagccccgtttgtctgactattttgcttctgaaaaacaaaaatctggcactcgattaacacaatgctcgtttgtcagcgcgaacactggttgtttctagacatggaatctcaaacaagtcagcagattatcatttggcgacatgtgtctcgctaacgtgtcaagttattactctttactaggcactagacagccagacataaatattttcaatttgctacttcaattcaatcacacaatgcgaacaaaccgcataaacaatgaaatccgatcaccatcaacctacaaacacaaca

SEQ ID NO: 303288 - DNA, 430 bp, Glycine max
  unsure (1)..(430): unsure at all n locations
tctttcaagggggacatgaactatgattgcacccttatatgtgcttataatttttacatttcactggaagagcaataacaatatgtatgttcactttctagagcatctcaatacaccatgattaatgcacatttttagaactcccccctcccccctccccctttttttttctaaatttgtgggtgtgaaattataaagcattaatcaacttgtaatttttcattctatgcaatgatgattattatgtttttatcaagagtggacattccaacctccaatttgtgttactagtcctaaaatggtagaattgtttgaaaatcataccaataattttctcaaacgaaggcattgtgttgtaccaattagagatttgttctggatgtttagaatgattacgattatangatgagatacccattggattatcaaa

SEQ ID NO: 303289 - DNA, 391 bp, Glycine max
  unsure (1)..(391): unsure at all n locations
agcttgctgcgtgcacaagagaaacaagaagaagaagatcacagaagaacgaagaaggtcgcggatcaagaagaacgagcacggaagaagatgaaaagcttgggtgcaaaactttaaaaaaaaatatgcaggggtattttttacttttacccttaagtgctgggtgcaccagcaataatgcttggtgcacctaagcagccccctttattaaacctctaaagttagttagccacgtgcaacacgcgagattcacgatttctatctttgacgtacgtacacgtagtcgcctagtatcctacattgttgtgccgcgcaacataatttacaaaataataatanaatcttacaacgtaattcttttctgatgctcttacacatatatattgcatac

SEQ ID NO: 303290 - DNA, 432 bp, Glycine max
tctagccaaatggacttaccttgaattaattcctttgatagcccttttgagccttgtttccctttccttgttttgaagctcactacaagccttaagtgaaaaaccatgatatcaccatatccttaaggaattttggagctttggaattgttttgggaataagtgtggggggtttttgtttcattggacaacttgttttgttggctatgcttcatgatgtattttgggccatacttgatgtacattgtatattggttaaatgttggacatgctgaatgaaatgttgtttctcaaaggctataaaaaaaacaagaataaaaaaaaattattcgaaaaataaaaaatcgaaaaaagaaaaagaacagcaataaagttgagtgaataagatcttaaatggcacaagaatgatgaaactcttggttctactcttcat

SEQ ID NO: 303291 - DNA, 389 bp, Glycine max
agctttcttttgtaatagccccaacaataagatttggaagttgatactctaccctgtgtacaccacacgtactgatactaagcaataatattttgttgaaataggtagctcaaaatttaatagctaattagtggattcatttaaaaatagtgtcagaaagattaaggatattccaaaaatattgcccaggaagaacaacttctgatatctataagtattaagtagtctcaaaacacaaatggcaggaaaaaaatgaggaaagactagaggctctctttgacaaaagttgcaaagtatttggtggcataccttgagaatagccgcaatatctcacaatgtaatttagaagctgagtaagcatacactctaacacttgtttccacaaccac

SEQ ID NO: 303292 - DNA, 396 bp, Glycine max
tgcccttctgatccgaagaggctgacccttgcggagcccgtcgagagcgaaattgacctcgtcaacgtgctccatcatctctccgaactcctgcgcctccatcagcgtcgacgtcgccggaatcccctccgccggcgcccgcttcgccctcttcgactcccttgctccgcctgcgccggtgccgtttccgaagtcgccgatctccgaatcgaagaaggaccaatgctgcgaggacgagtcctgtgaggagaacgcgaagccgcagagagggtcgtcaatctcctgagataaggaatccctgaatggctccgaaacgtcgtcgtttagagaggacgagcccgaatacgttcccgagagggttcctttgcggcggccgtatgtgcggacgatcatctt

SEQ ID NO: 303293 - DNA, 341 bp, Glycine max
  unsure (1)..(341): unsure at all n locations
tagcttctagtttgtggtcatgtaacactaaggctttggatttattttccctatttaaaaccaactcagtgtttccaaaagatgcttttttatcaaattatgcacacatctgagcccattaaggcattcggaaaaattttcacagcattcacccttcaggtgtacacatatttttttcttttttttcaaaaaccttttgtgttttgatcggcggaaccttttttcaaagaaaaactggcagtcacttctttccaaaagcgtcttggctttgtagaagcaaagcttcatggcgaatcanaggtgttntgatgataacaatgatgataacacaagatgatgac

SEQ ID NO: 303294 - DNA, 295 bp, Glycine max
tattttccattcttagaggcttttacacatgaggtatgactcaactgcatgtacttacactagctatgtctgctaaattcgactccaaattccaacaaactccatgcagaatacgcaactcttttattgaatgataatattaggattattaataatttaaacataatattgctctcttttttatcaatagttttaaaactattacaaacgaatgaacacaaatatttgaattaataaattaatatttactactatattttaaattaatgtattgggcaatgatatttgaatgatg

SEQ ID NO: 303295 - DNA, 375 bp, Glycine max
  unsure (1)..(375): unsure at all n locations
agcttatcccaagaggggatggacctttttgatgcaatcctatgccgcaagggcattggatagaagaccccaagtagaatgggccacagatgcaagagaaggccctatggttcttatgagccttanggtagattctgggcccatgggctaagtacgagcccacttatctttgtaaatattagattaaggtttcattatttttgggccttgcatttacggctccataatgtacgtagggtaccctagaaatatangatttttcagcccttgtattttacggcacctagactagtttttgtattacgggtagttttgtaatctcacatgcactaagtggatatttgatgtgtgcggctggaaataaacttaattgaa

SEQ ID NO: 303296 - DNA, 428 bp, Glycine max
ttctccactaagttgcctaatgcctgaaatgtcttctctaatggcaatggtcctagatgcagggaagaatttttccatgaacaccctattaaggtcatcccagctgaaaatagacctgggagcaaggtagtatagccaatcttttaccactcccttcagagaatgaggaaaagcctttagaaagtcatgatcttcttggacatcagggggcttcatggtggaacaaacaatatggaactccttaagatgtttatgaggatcttcacctgcaagagcatgaaacttgggctgcaaatgtattagtccagtcttgagaacatatggaacaccctcatcagaatattgaatgcacaagctttcataagtgaaatcaggtgcagccatctccctaagaatcctctcacgaggtggaggttgatccatgttct

SEQ ID NO: 303297 - DNA, 395 bp, Glycine max
  unsure (1)..(395): unsure at all n locations
aaaccaacatgtttaagtaataataacaataataataataataataataataataataataataataataataataataaatattattattattaaataaaaaaattaaaactcttcagattcttataaaataataaatagaaaataaaagacattttcagacaatttaaatatttttgtttggctatattagtataaatcatctctaatccatacattttttaatattatgctctttttttattttcttttgatatactttgtgttttaacgacttgaatttaatatgattatgtttatcaattatttttgaatttgtacattacttatacgtaattctataagtttcattntttttagttagtatttcactaggttttaaaataattaattgg

SEQ ID NO: 303298 - DNA, 64 bp, Glycine max
ctccgctcatgagaatcagatgattcaaatgtttgatgtaacaaagatgataaccaaagatgat

SEQ ID NO: 303299 - DNA, 397 bp, Glycine max
gcatttagaaatgttagtcagtagacaaattgattgagaaagaaaagcttgaaccataactcggtgagagtgtgaactcaattattgagagaacgactagcatagagcaatgacttttgtttcaatctctgaattttagaatgaaatgcataaatatggatatgatgaaggccattattgttttgaaagccacttgaccaaaaagcttacctgtttataaatgataatatcatttgcacccttctgtgaattgaattgtaatggtcaaattgaaccttaagctttgaaattgttatctctatttaccttgcttaggatttaattgggttaagacaactttgccccacatttgggggagtttgtttgatggataatttaaaaggtaagaaacaacacg

SEQ ID NO: 303300 - DNA, 482 bp, Glycine max
cgcgcgcccaatgagcctcgtattacgtcacactatataatactcaagctcgtgtcaacaaataggacaccttctataaatctaggattcatgcacgggtaaacctttgtagttgttctacgttaccgtcatagtgatttatttgtgataaatggtgagccaaccaacttaatttaaccatactgtcttgaagttcaccttcctgtggtctgactcccaacaattcttcacataaatcaacccaatcaagatttgttggaccaattaatggtgccccatcaacacgcagacctaataatacagagacatcttaaagagtaatcgtacattctccgcatctcatgtgaaatgtatgtgtttcgggccttcatctgtcaatcaaggcagtcattaatgacgcatttattcttaggtatgtcatcttcattatccaataaaaactagattgccgaagtagaggaataatctcctctagtatttcg

SEQ ID NO: 303301 - DNA, 393 bp, Glycine max
tacaccatgatatcgccatatccttactgaattctggagctttggacttggcttgggaataagcgtgggggatttagtgttcttggagcacatgttttgatgggcgtgcttcatgatagattatgagccatccttgatgtacactgcgtatgggccaaatgtgggacatgctaaatatcatggtgtttatcatatgctactgcttatagagctacagaatcggcgagcatactgatgagccgtgaggtggagtgaataacatcttaagtgaccacacatggaggagactgttgagtctactctgtatgatcaaacactatctttacttctttatattgtcctatcgttacgtactatgcactcatgcatcattagctctctattcgttcgagc

SEQ ID NO: 303302 - DNA, 428 bp, Glycine max
  unsure (1)..(428): unsure at all n locations
tcgacgcttggtaagggatatacgtccttgtagatgtcttgntgatgtcggagtagtcagagcacatacgtcatttgccattggccttttttaccatgacaatgttggccaaccaattcgaatatctgacctttctgataaattgggccttgagtaacttgtcaacctcctttctgaccaccttttgttgctcttctcccatctntcttggcttctatgatactagtttagccttggggttgatgaccaattcatggcatatgatgctagggtggataccaagcatgtcaaatggttgccaagctaagtgcactatctaggtttatgtccaagttctaacttgacaagttcttcgatcggtttcagacctttgtgaaaaatgtcatcccacggatctacatcgaatacaccatcttgatatatcctan

SEQ ID NO: 303303 - DNA, 397 bp, Glycine max
ctttgttctttttataaaatgagaagttttgaactcatcatgttatctaaaaaccttggggtggatccaagtgctccgatcatccatttgcatactcatgttttggtggcatactcaccgttgcttatttctttaggaatttcatcataactaagaaaacatcaaggcacccctataacactcgatccagaaaaatggataatgaagagggcgtgcaggaacagatgaaggccgatctatcggctttaaaagatcaaatggcttccatctcggaggtcatgttaaaactctagaaaaccatagaggataaagccacggcaaccgcctccagtatggttagggaagcggagccggtgctgcaacccgctttaaatccgggccgagacagatacacggg

SEQ ID NO: 303304 - DNA, 429 bp, Glycine max
acaaatctgttttaaatccaagcccataagtaatatctaatcaaatctagataagataagataagataagatctagatgaaataatatctagataagataagatataattttgtagaataaattagtctgccctcttcaagtccaagcccaattctggattcaagcccaagcccaattctagattcaagcccaatgcttcattaattcttgaaattagattaaaaacatcaaattagctgaatggacccaaataataaaactgcctaattaatttgacaattaagactaatcaatacttaaaatggtgctaaaagggttaagaaataggagaaaataatggcacatcaaaaccccccatacttagccttttgcactcctgggcaaaatgaaataaagaacacaatccaaggatataaaagagagacaag

SEQ ID NO: 303305 - DNA, 407 bp, Glycine max
  unsure (1)..(407): unsure at all n locations
tgcattctttggacaagctaaacatgcaaactagaaactaaaatcaaaaactaaaaactgaaacataaatataaacctaaattataaaatgtactaaaagcaaaataataataaaagtgttcaaaagataggaaaatagaagtcctgtcatgggtcctatggtgggtcctgtggtgcagaaggggaaaaatccatggttgtgacatcatcctcatcctcagagagctccagcacaggcgtgcctactggtgatgcctgtggggaagtcaactccagcacaggtgtggtcactggtgatggttgtggagtcgtgtcgggagtagcctccacaacgtcctcctgagtagctgggtcagtctctaagatctctggctctggaatctctaagtcagcctctggatcaacan

SEQ ID NO: 303306 - DNA, 425 bp, Glycine max
  unsure (1)..(425): unsure at all n locations
taaaagcccaattgaaccttccttcttctggtatttttgtcactttaagttatgcagttcggatttaattatctcactctcaaataagatatcttactcctgtatgatatgttctctctctctctctctctcacacacacacacacacacacatatatatatacatataatcttttccgatttggttttattaaattatgtttaaagcaataaattcaattagtatctttacaattcgttgattgatttggtttttaaaatgatgttttgaaagcccatatatatatatatatatatatatatatatatatatatataatagccttgtatttaaaatagaaaaattaagactaaattagaattttgatccgcctgtagtttcacatctaatccccttatttctaaatcaagacatgcatnctttt

SEQ ID NO: 303307 - DNA, 486 bp, Glycine max
  unsure (1)..(486): unsure at all n locations
gcgagaattgtgaatcgatcgacactctnggtgaatacgatctcgagacccgcggatcctttagagttcacctgcacgcatgcatgctttatatatatgtacacaatatttgtcttactttgcggatgacaataactaacattttgaccttgtaatttgtctattaaaagaaaaaagaggagaattctgtggaaaacatacacttaattcactttacgtttaatccaacttggactttatttatgttaactcacacacataataatgaatattgctgtaacgtcttctattgttggaataggtggatttggtcacaaaagaacctggattaggaaaaactcctatatagttcatatgttataggtccactcacttcaatagttgaaatctatgcatgcattaagagacaattgcaagtatcccatgtacaatacccaacattttaattgaacatgattcattgtcagacaaacgctatactgcttg

SEQ ID NO: 303308 - DNA, 143 bp, Glycine max
agctttgacatgacttctgggctgacgatcacctttgctaacagccaccttgctgctgttggccaatctgatgcccggtgcagctctgctcctacttatatcaattgcgcattactgcaacttcctttctgctatctacgaat

SEQ ID NO: 303309 - DNA, 482 bp, Glycine max
  unsure (1)..(482): unsure at all n locations
agggctggcnttttggcctttanngcttgnagagacantatantttactcaagcttatggtaaaatctgggacttagccatggtagaagtcttcactttgccattgcctccctcgcccaatactatgatcaaccgatgaggtgcttcaccttaggggacttccagctatcacctatggtagaagaatttgaagagatcctgggatgccctctagggggatggaaaccctacctcttctcagggttctatccctcatagtccaaatctcggagcaggaattagaccacaagaagcaagtcaaaaatagggtggttggaataccgagaaaatatttggaggcaaaagcaagaatcttggcaggtaaaggcgagtgggccccgttcattgatattctcgcactgttgattttcggaggagtcctctttccgaatgtggatgggttggtggacctggcagtgatcgacacttttctcgcctatcan

SEQ ID NO: 303310 - DNA, 473 bp, Glycine max
  unsure (1)..(473): unsure at all n locations
gcgtgtttgtgactcattgacaccccttgatgcatcactacctgggcaattcagctcggacccgggatcctctttatttacctgcaagcatgcaagctttctagctcttcattggtgtatttcgatctccttttgctgctctaaattgtgggaacgtgctcacatatgtggggcaatctaggcttgtatccttgcttgactaacctgaagtgccggtttgtatgacatggtcctatgcctatcatgcattttgaagtactgtgtcatgccacaattgccgcgttctcttgctattgatgcctaaacgcgcgcccaccacttgctggtgaaatgcctcaatggcattatcacgtgatttttgtaaggaaacaacccatgccgctgattggtttgcacatacttttgggacatgcattccttttcgacagagctacaataatctgccctcatgtgtcttacgtctcgataccacn

SEQ ID NO: 303311 - DNA, 395 bp, Glycine max
gcctctcgacatattatgcgcccgaatcggacatccgtgttatatgttatgaccattcgaatttctcgagagcttacgatgttcaattccgagcgtatcgacatattatatgcctgaatcggacctccgtgtgaaaagttatgaccattcgaatttcccgagagcttacgttgtgcattttcgagcgtctctacatgtgatgcgccttaatcgaacatccgtgtgaaaagctatgaccatttgaatttctccagagcttccgttgtccaatttcgagcctatcgatatgttatgcgcccgaattggaccttcgtgtgaaaagtcatgaccatttgaatttcactagagcttacgatgtttaatttcgagcgcatccacatattatgcgcctgaat

SEQ ID NO: 303312 - DNA, 380 bp, Glycine max
tttacagcagattttagtaatgacccactaacctataattaaaataacttaatgccattaacctagggaattaaaaaaaaacttaatggctgagtgtaactgatattgtggcaaccaaaagtcacccccaacagccaacaagtcagtcaccatttggtctcccaaaaggctgatgcctaggttgccaattgggcccttattacaacttgaactaaacctatctaaagcccttttagttgattaacccaaaacatatttttggtcagccaactttacaaggattgcgccattatttagacaaactaaacactctataattgagacaaagtggtgtcatttagttctcctccattagggccatgatacaactcacaaccttg

SEQ ID NO: 303313 - DNA, 423 bp, Glycine max
  unsure (1)..(423): unsure at all n locations
tcaagatatttgaatggtcataactttttatactaatgtccgattttgggacataagatatcaagacgctcgaaattgaacaacggaagctctcgagaaatgtgaatggtcataacattccacacgaatgttcgattgggggacataactcatgtagacgctcgaaattgaacaacgtaagttctcgagaaattcgaatagtcataacatttcactcggatgttcgattcgtgggcatattatatggagacgctcgtaattgaacaacgtgatgtgaatttgagtatgagcggatcatttgataccggctacggaggtttggatgacgccacttccagtgaaggaagataagtcatggtagacgccacttccaatgaaagaagataagtcaaggtagacgctcactttcagagaaagaagatn

SEQ ID NO: 303314 - DNA, 396 bp, Glycine max
ttgtgtcacttactttttggttagggcgtctcaatttcatgttagctcttagattttttttttttattaatccctggttgtattcatcatttcattaatatagaaatgatgagttgatttcataaaaaaaaagtttgagttggacttttttgctaaacaaaggcaaacgagtaaaatatcaaattagtccctcatttttagaggcactgtcaatttgatccctgagatttaaaaaatatcaaaatgatcctcgattttacatttcgtttgccacgttagcccctgtcattagtagtctcctaagaccgttagtaaatgtgtgatatgacacgctaaatgtcacctagacacacacgtgaaacttccacatcatgttttcttacttgccacgaaggg

SEQ ID NO: 303315 - DNA, 332 bp, Glycine max
aatgtgcccagagttgattcacaatgcatatgaagaaccacatggtcacatgactaccatcctatccatggttttggttctttctaactttatgtgggttatcactttaggttcaaatatatttttatttttaatacatatttaattcgcctatttattcctaacaaattctttattttctatcgaatgtttaataaaacgattattttatttattatcattcatattttattcccatcttcgataaacgagtgatcttatgattatcctatgatatatcacatacttttatgttagtttgggctatctataaataataaataatactttta

SEQ ID NO: 303316 - DNA, 397 bp, Glycine max
aattctcagtattatgaacatgtgaagcagtaccctttatttttaatcttgattaagtctcttccataaataaggattgtacccattgtctacacgaaaataaagactatctatcttccaaaaatgtaaatgcttttactttatagtgtaaaaaaggaacaacaaaaaagaaacacaccctcatcttttccacctatcctacatcttatgttatctattttactaatatttgatagacaactgtgattgaagtttttttctttttgtttcttgctctttttcttgtgatgattgaggaagtaccctttttctggaaaagtaagttctacattgattaattgtattattcccatatttttttttagctgaatgaacagacatattttgacccatttag

SEQ ID NO: 303317 - DNA, 319 bp, Glycine max
ctttcaagccaatttctattcaatgacaaattgtttatattatggagactggtgcatcagtccagacaccgcgggtcactcttcatgggacatgtttacaactgttcatcacaaaactaaagctcccttgaataactgaattgtaacatcagttatcacctttatcttcacagactacaacagaggctaaaccacacgaatcttgtgactgtacatcacaagcacaaccattggcatgagtcccaatctgtcaatattacattacaccatcagaagaatagcaccactcaatatccatcagacccagtatttcatcttc

SEQ ID NO: 303318 - DNA, 402 bp, Glycine max
  unsure (1)..(402): unsure at all n locations
tttctttctctagcttcccaaggaagctaccttcctttcttctcaaggaagcttccaatgtgctaggttataaatagaaacatgtgtaactcttgtcataactttgaggaatgagaaacttgtgtgacacacttcaaagttcaacttctctccctaatctccttcaattcccatgcccccctctctctctctttctcttcctccattgaagcttcctctctaagcttcttatccaaggcactctcttggtggtgaagcttctgcttccatggtttattctttagtggatgacgcctcctctaaccttttctcctttatcttctgctgcaacaccgtggctaanaaccaccattgaaggaccttattgaagctcatagatctagcctccatagaagctttcag

SEQ ID NO: 303319 - DNA, 415 bp, Glycine max
ggacatgaggaagtgttgaagggtgaaacttcctgcttttattgttgaccacagagtggtacctggagatatgtcgcgggggtcaggagaccttggggacgtcaggtggggtgctattgcccaaaaccaagcttgaccaatcccgacccaacccgggcatagtcggccagtgagaacctgtgatgtacctaagcaggcgagctcctggcagtcaacagataaaaggaacaaagaccacaaagcatggaggcttgtggcggctggccagctgtgaactctgattgatatgtgggttatggcctctggtaatcgattaccaagggtgggtaatcgattacaaggcttaaaaatgaagacaggaggctaacatggtctctggtaatcgattaccaaggggtgtaatcgattaccacgc

SEQ ID NO: 303320 - DNA, 265 bp, Glycine max
agcttgtttttataatctccccctttctgatcatgaggaccctgaaatcaagaaacacatacacattcttttcccaagtcgatcactcacttaattctccatattctccccctttgtctttgagcttaagcctcactcgaaattaagctatctaattatgtgagttcttgatttcctattctctctccccctttggcatcaacaaaaagccaaagtgcgtcagaaatagaaaacatacataaataactaatcatacaagagaata

SEQ ID NO: 303321 - DNA, 424 bp, Glycine max
tggtacgtagtaggtattgcattgtgcgaaactaatttttttcgttggatatatctgtaccaagattaggtggtctgaacggcaggggatctctattggcaaaatattgataattagttataaattttgacaattgctatattcagttctcctcgttattttattcactttctttttgaatttgtttttttttccaaagatatcccctgtagaaaaaatacacgctctcttttgaacatacttacgtcattaccctcctgagacaaatatacttcccagtcgagaagcgctacactctgcatgacccaaacacaaaaaacaccatttagaaaaaaaaaatcacctcataaaagacagaaactcatagatggaactttctttatctagcagtagtagtaacactacccattaccacccaagcttc

SEQ ID NO: 303322 - DNA, 394 bp, Glycine max
  unsure (1)..(394): unsure at all n locations
agcttcttttgtattttgaacaagccattaactgctgtgtcagaaccatgctatgtgctcgccactggcctctttcttcccttcgcaacttgagttcactattgctaccccatagagctccgcgaaatttgtctccgccatactcttgcttgcgagccctcttggtctcttgttcaagggctcttgcagtaattgcactctcttcccgtaacccggcacactccttccgaacgcgcgtagcggccaacttgaacttctccctggcaagttctgcctttcctaactcgctcttgagagtncggacttcttcgtcctcttccggtgcttcaaaactctctctcctgacgacttttcactcggcgagccaatctaaacctcgcatatgaactatcag

SEQ ID NO: 303323 - DNA, 438 bp, Glycine max
tatgcgcatatttccttacaaacgttctcttgcacaatacattctattaaccaaaaaaatgcacccatatacaatcaaggcaggttcgttacctagattatttacacgtacttccaaggtgcatttgttacttacatcacacacctccttggctaaattcacatacatgcatactcaaagcattttggggtaccaaaaattgcacatgtgcacatcttggtatttctaatacctatacatacacaaacttcatgatgaatcttgactatctacacaataaggtgctacattttatgctcttttcaagtttttgctacctaaagccgcatgcaaattcaagtatattttcctttgctgactaaaattgtattcaaattaaaaggtatacattttttggtaatgtatcttctttacataacatgcaacatatctatgtat

SEQ ID NO: 303324 - DNA, 191 bp, Glycine max
  unsure (1)..(191): unsure at all n locations
ttctttgtatgangaagtgtcgaaaggtgaaacttgctgcttttatctgtgaccacaaactggtacctggagatatgtcgcgggggtcacgacaccttggggacgtcagatggggtgctattgcccacaaccaagcttgaccaattccgatccaacccgagcatattcggtcactgagaacctgtgatgta

SEQ ID NO: 303325 - DNA, 428 bp, Glycine max
tgctaacccatggaagctcctaatatctcccacactttttggggtgggccattcttggatggccttgattttctcagggtccacttggaccccatttctaccaactacaaaacctaagaaaactatattatctacacaaaaggtacacttctctatatttgcatagagggtgttcttcctaaggactgaaagaacttgtctgagatgtcctaagtgatcatctacgctcctactatacactaaaatatcatcaaaataaacaactacaaatctacctatgaaatcccttaagacatgatgcataagcctcataaaggtgcttggtgcattagtgagcccaaaaggcatcactagccattcatacaaaccaaacttggtcttgaaagcagttttccactcatcaccctttttcatcctgatttggtgat

SEQ ID NO: 303326 - DNA, 76 bp, Glycine max
actttttttaaaaaaatttattaacttttgatttttaaacgaacggcatttttgtaaattcaatgaattgcttggt

SEQ ID NO: 303327 - DNA, 434 bp, Glycine max
  unsure (1)..(434): unsure at all n locations
tgcacttgagganannncnagacgacatctnancgctagtttttattttacttctaacctccattgaggacagagattcacacttatgcctccccactcctgaaagactcactcttttgtccactcacaacaccagattctctctttctaaccctaggctaactctacccttaatctctaactgttcccataggcaatcccagcatataaacatcatcacataaccctaaaacagaatgggtctgcctaactcatcccaacatggcaattccaacaagcttacaacaagatccttcacaaataatcatcagacagcataaaactacacaacaccacccatcatatctcccataacaccatacccaccaaacttaacagagaaagaagtccacctaaacctgaatcttccaagccccactcgacagcacgcactt

SEQ ID NO: 303328 - DNA, 377 bp, Glycine max
  unsure (1)..(377): unsure at all n locations
atcttctacttatgtggcagggcgggcttccttcactttcttgtctccaacgcgagctttgaccactgctttctcttcccgcgatgcttctgttcatatcccccctgagtgggcttatagcctaaaccataccttccacgatttcctttggcatttatcaggctagctatgccgccgttgtctttcgctaaacccatttcgggttcataaccgttccccaacataactcgggccatcattactgctgcatcggacaaacaagtcgtccctttatacttgtcgaagtccggcactttgaacttccgnggaataacaacatcacgtactaagcatagatccgtcatgtctgcgaacggatagtctccaaatccttccac

SEQ ID NO: 303329 - DNA, 432 bp, Glycine max
tttatcaacttgactctttatgtaggtcaagaggctttttatttaaaaagaaaaataaatcgtatatttaaatacatcatgacaaatctaatactccctgctgtcctatatatagaaacaagttactcgttcgtcaagaccaataaaaatagtttagttagttagttttaattaataatgtcaaatttaaattttattcaaaacatacccttttaaggtattttgtttgagaagtagttgcatttaatgacatgagaaacagtgtaatttatatttttaatagaccaataaatgcatgagaaatgagtagttacctcattaatggatttcacaacatgaagggtaaaaaagaaaactaacaattaatacatcttacagtgggtctatgtttcttataatgaggacaaacaaagaataccctcttgtttctta

SEQ ID NO: 303330 - DNA, 373 bp, Glycine max
agcttatttgtttaaaaaattaaagatctttttgttatctttccagcgactactcacacgttccatttggagttctttagtgtcttctacgcttgcacaaggcagataggtcaagtaagcacaaaatctaaaatttaactacaattctcaattaagctcaatcatttgccttagaccaaaaccgagttaatgtgagaaaataacggtcaaagagatttcaattgacctaagaagaatagacaaatattaaactacaaatactcaatcaaattcccccacactttatcatttgaactcatgggagaaactaacagacagattaagacaaagatatcaaacttagaaaataaccacactaaaagaacgtatgaac

SEQ ID NO: 303331 - DNA, 347 bp, Glycine max
ttcttgtttctttataagacactcaacatgtcatcaggatgcacactgaacacgctcctcaatctgttatattgattgtgaacgaatgcttcaaccgtaactcggtgacggtgtgatcttaactgtgagagaaacgactacaactaggttatgaattttgcatgattctctgaattatggaatgaatgcatgaatctgacgatcatgaacgtcatgcttgattgatatagccacttatgcaaaacactgaccctgtgcatgaatgatttatcccttgcacccagattgagtctaattaatgtctgatcgatcgaaccttgagcctcgctagctatctcatgctacct

SEQ ID NO: 303332 - DNA, 411 bp, Glycine max
ttgagccaaaatcctgactcaccatagaccttgactcattgtgttaatgtcaatccttaccctcggaagcgaaaaggaaagaaggaagatttccaatccaagagaatgcatataaaacgaatgagcagaaggaaaattccccaatcaaagagtgggagaaagcacaaagataacaaagaaaattcccaatctaagaatgggagaaagtaaaaaaggaagaagaagaaggaaagaaagctcctgatcacggattgaaggaaaacagaagaaatgtgcacagaggtctttggaccggacaatatctgaacaatacagaattgtcaccaaatgaacaaaaagaaggaagggaaaccacaacctaatgtggtcttctccctttaattgccaaccagaatcttgtgtgctagcgac

SEQ ID NO: 303333 - DNA, 388 bp, Glycine max
agcttatgaatagaaagaagaaaatcatgcaatagatttatcatatttcattttcaaactatgtggaacaatattagtacatccaaatattatagattagaatttttcactatatatagactaagaataaaaatagttttctcacattctactattcttttcacaagtctctattttctaaactaatgtattctttcttcaagaaacctctttagcctcactttaaagaaaaaattgatgttattaggagatagacaataaatactccatgataactgaaagtattctctaaaactgcacaaaaggtgcaagaactaataatgaaacttagaaatgaacaaacgaataatggttcttaactcttttgatatgtagcaagatcattatc

SEQ ID NO: 303334 - DNA, 431 bp, Glycine max
ttctcccaagtactaaatgacatttcaagctagtattaactcactttaacctccatttaccacagaattcagacttagccttccaactctcaaagcctcactcttttttccactcacaacaccacattctcactttctaaccctaggttaactctacccttcatctctaacagtttccataggcaatttcagcatataaacatcatcacaaaaccctaaaacagaatgggtatgtctaactcatcccaacatggcaatttcaacaagctttcaacaagttccttcacaaataatcatcacacagcataaaactaacaaaaccacccatcatatctcccaaaaccccatacccacgaaatttaagagagaaagaagtccacccaaacctgaattttcgaagtcccactcgtagccacgcacttcacgacccc

SEQ ID NO: 303335 - DNA, 371 bp, Glycine max
  unsure (1)..(371): unsure at all n locations
agcttgtgtgttagagaggatttgttcgccttgtggaccaaagagctccaaagggttcttcttgtctaatgaatgtactangaatgctgatatagtttgcattggtgtttctttttatcataacagttattgttttggtgtttgtgtacttttttccacagtaaaaggatttatattaatattaagtgaaggttatgcttgtcacaagaagtgccacacccaacctcataaatgcatcatggagttccttccaaaacactactactcctttacatatatattgattctacaacattataaggaacagatggtatcaacaatattccatagtaccctaccatgccttctagtgttcccttggtccttatttc

SEQ ID NO: 303336 - DNA, 423 bp, Glycine max
tctactccttttgttgctattgttgttgttgcggctcctactcctccacctcctcttactatctctattaaggagatttctatttctcatgcgactgaagttagtgcgccagtcgcttcggtcagtgctgtcgaggctcctctgtctactattgttgcacccttgttgagcgtcggtgtggcaaccataagtactcccgtgatgtcccttcctccttcttcagcttcatcagttccccccttgaccgtgttggtgtcagcgttgtcttccacttgtcttttcacccaagtgtttctttggatcacatcttcacttcttgtgatgttgattttctatggggtatgggttacaagcctgaccagaagaccctcggtggctttgtgtcaacctatgataaaaatcttattcggtcagctggggtct

SEQ ID NO: 303337 - DNA, 397 bp, Glycine max
  unsure (1)..(397): unsure at all n locations
aatgttaatgtcacatcagataatatcaaaaactatatcaaattatggagatcatgatatggtattgtaagtgacatccttggccagagtaggtttgattgggatggcactaagcacatgatcacaattgagaatgaaaatgcttgaaatgaatattgcactataagtattctttaatatattgctatttgttattcaaagtagattggatttgactttttctttttttccagtggcataaatagagtaaaccgttttgattcaaggtgcttcaaaactaggatgatacagtggatttgtgcgctaaagatagagccattggtcatggagttgaaactgctgatgtagctccatgtggagcttgtatgcctaggatcttcttcatcaatggagtacn

SEQ ID NO: 303338 - DNA, 426 bp, Glycine max
tatcaaggagtacgactagatcctcgttgtgaatgctgacaatgtgggatcgaaccagctccaaaacattcacaagggtctctgcaatgactctgtcatcctcatggggaaggaaattcttcttttaggtgcatgataaaaaggtatggagttccaagtgggaaatacaagttttataggtgtgcctagcagtggataaacaaccattgtatcttaatagcagctgctcgaggcatatgataggagacaaatcaaatttcttgcctctaaaagctaaagaaggaggatttgtaacctttggtgacaacaacaaagggagaattctcagatacctctttatgatgatgatgatgtaagaagtcctaaagaatcctctcctacaagtgaaaaggtagtgaacaataacccttttgaagaacacccact

SEQ ID NO: 303339 - DNA, 365 bp, Glycine max
catgtatggcttcctcgagcggtgacattatcttcaaacatgagtgaacgaatcataacgatgcatgtacttacgagcttacttgaatcagtaagtaatatttatctagtacattccaaaaatatatgcattatacgtacctaattatatttgtggacttcaaggcacattggtagcttgttggtagtccacgagaccataattgtggctcggtttgctctctacctaagaagcctaatattaacatccaagttgccactaacacgctatggatcaaatcataattcatttactatataacaattataggcaacgccaacataatcttaatcttatatatcgttatgcgctttttaaccatgcat

SEQ ID NO: 303340 - DNA, 432 bp, Glycine max
  unsure (1)..(432): unsure at all n locations
tacactcagactntgatcatgttcgtgatcaagtactttctgtggatcaggttccatccatggattctctcatcactaggcttctccgtgtgcctcacttatcgaaggatgaaaatcctactgatagtgtggagacgtcagcaatggttgcatcacgtggtagaggaggcggtcgcaacagcagaggaggccgcaatggaaggggtggacgtcctcattgcacctactgcaagaggatgggtcacacccaagagaattgttattcgttgcatgggtttcctgacaaggttgcacaggtttctagatcagagaaagtagagtctaagttctctgatgaggagtatcaggagtatntgaagctcaaatccgagagacccagcaaccaagctcaatcctcatctgtaccatgttnttcaacagcttgtatctctc

SEQ ID NO: 303341 - DNA, 236 bp, Glycine max
  unsure (1)..(236): unsure at all n locations
agacatgaatggaataagattggagttttcaaatgcttggaagcattcaaaattctcatttgagaagaacctcatatctatgaattttgggtctacaatggaacgagaggaaaaaagatttgtgtaccgtatacgctgttcctctgatgagaataataacccacaaggaatggacggagngaattgagcttcctgtgacccacaatgccgctgactccgactcgaagttcctttgc

SEQ ID NO: 303342 - DNA, 439 bp, Glycine max
tgcattcggaattgcgaaagccccactccatcattatgattattacctgacatctcaaacaaacaaatcaaacgtaacaagacaattatagttgctgtttgaatacctcacccactcaagtgtatcacacaatgatggcttttctctaatgaaacactctttccttttaccactctaattccccttgagttcttaggcaattcaagagattatggccacaacaaagaacaattcaccaatatgtgtaaggtaaggctagagagacaaggaaaaggttaaccaagaaaaggctaacaatgtttttaggcacaaatgaaggaaataaaattcagaatttaggaattcaagtaacaatcctccatgcaaccaatatattaccttaaagagattttttttaaagttcttcaagcattgaaccattcagcccaatttttttttt

SEQ ID NO: 303343 - DNA, 238 bp, Glycine max
agcttctattgtttctacaatagtcgattatcaaatgcggtaattgattatttcgaaacatggaaagctcctaatgttccatacaaaatctaatccactacaatatgacataatcaattatttcaaggcacaatatcacaatcaatatgacaaatactgcagaaaactcttaccaattcagggcagatgtgcccttcatctccacaagcttccttaacccatgatactcgaacagttc

SEQ ID NO: 303344 - DNA, 434 bp, Glycine max
  unsure (1)..(434): unsure at all n locations
tgtacatcctgaanaaataaattagttagtgtatattgtattcattctgcattacttggatttcaaaaagaagtacccataaacaatattcgaattaggcacactgcattatagaagttattttagaagctacacacaacaattgtaatcatgtataatgtgaaatccccaatttcaaacaccatcacaaaattataaataaatttgccaggtggaaaagatgaccacgccaaaagtttaaccaatttttcatccatattaactatgaagatgtccacatcagttagaaatatagccaaaatactccttatacggcttggacaatcatctaacctcaagctagctatgcggtcatgttatgcctagcccatttttaattttaactaaacagaaatttttcgtccatttataccttgtaaaacaatatcaaaaca

SEQ ID NO: 303345 - DNA, 569 bp, Glycine max
  unsure (1)..(569): unsure at all n locations
acacctgtatctcaccctaaacaccnacntaatgtantcaccttcttgtntattatattatatannnannnnnnnnaagagatgtttgatgacgtcgatggacactccaaggtgaatccgagctcggtgcccggcgatacagtagagctgacctgcatgcatgcattctttatacctcgatacaccattccattaatctcaactacataagatgccaagacctattgaattgcggaaccaatgtcacagaggcgcacatctatgacagcttcctaaatggcaagccaaacattccatagcatgatagaggaaccatcgaattgcatgatctaagtggtgcataatgaaaacctcacacgacacacaacgaacataggatatacggtggagggtgtacggatcagaaaccatatattaagctcgtgaagcttcgccgtgctacagatctatggacatacaaacggataagagcgctcaaaatagagccattgatcacgaatctgaaactgataatgtagcgtcattgagcagctccggaggcattggatcttcatcatcaatggaagtcn

SEQ ID NO: 303346 - DNA, 526 bp, Glycine max
  unsure (1)..(526): unsure at all n locations
acaatcgacccccggtaacaacattacgacaaaccgaaaacgacacacccacaccnaaagccggannatgaactcgtgacgcaggccctaananacccagcgncacggacnccccagaacacgngcaagaggttatcccgaacacacctgacaacccgggagcaagcaataacatgtatgcggcacccaactgagaatgaagacgacagaacacccacaattcaaaggctacaccgacggtggcaaccgcgagtaggaacaaaaccagcatgcaagtcgccctagacgaacggccatagaatacggcaagccacgcaggcacatggctcacaccatttgaggccacttatggtaaacctcctgcgaaaagtgggaagaactcaatgctacctcattggtaacaataagaaaggagggagcgcaccaaataggccgagatgagactaatcgaaggacaaaatccaataaagcggcaaaatcaagagatcctaaacagaaacaaaataaaacagcacagcgaacaccg

SEQ ID NO: 303347 - DNA, 330 bp, Glycine max
  unsure (1)..(330): unsure at all n locations
atctttttgtattccatatatagacccattaagcgtgcaaaccacatgctccccactatcacacgataaaccttcatgttgtntcatataaacctcctcctctaaatcaccattaagaaaagctgctctcacatcaatttgccgccactcaacgtcaaaatgagcacctactgccaagattatacgactagaatctttcttacatactgcacaaaaagtctctttgtcatctattccttgcttgcgagtcaatcccttagcaacaactcttgccttgtatctcctaatgttgcctaatgaatccttttctggcttaaagacccacttaca

SEQ ID NO: 303348 - DNA, 428 bp, Glycine max
  unsure (1)..(428): unsure at all n locations
agcacaatggcgattctaattggtcatctagtggattatattttacaaaacatgaatattatatatatcaacatgcattcatttaggaagacttaaccacaaagcatgaacaaaagctaggaaccaagaagcacaagaaagcgagcagccggtggaaggaaaattcgtttctgaagcttttatcgatccgtttcaatccatttttcttccatcttcttccctttcaccccacctttatttttgtaagtctctcatgacaacaaaagactaagattacctattgttggtagctctgtaaatcaaactctctttgatgtaatgattctaaactatcttttaatataatgctgttattattattcatccctatgcttatttatatacttatggtttgatcattcatctttatgtattggttaaagatatan

SEQ ID NO: 303349 - DNA, 345 bp, Glycine max
  unsure (1)..(345): unsure at all n locations
atctttgcagcatanggactaaagttcgtgagccttggacatcttgtcctaccgttactgacggaggagctagagtggatgatgaacggatgtcctccattctagctctttttctcgattccatttgcaactaaaaagaactaaaaactccttacaccaaaattgctcacgtttaacaacagaaataaaggctgaaactaacactacgtgcttancgagatatagctcgctcagcgcaccctcaaagacataacatatcggcttacctggagccaagctcgctctacctaatagtggtcgcgacaaaatgcgctgagctcacatgaactccgcttagcacgaggc

SEQ ID NO: 303350 - DNA, 418 bp, Glycine max
tagcgagggcatagcctctagaagagatatgggttgtttggcttgcacctggcaacacaactcaggattgagacccgagatgaagcaactaaggagaaacaacagagcgagaccaacgatacagttggccagccgttcaaactcgatcaaatagtcattgaccgtgctgtgttgatgaagcttgaagagtgtgccatgcgaattgtcataaaatgatggagcgaaacgcgactctaaggcctgaagcattacgggccatgtcgtgaggaagccgttgcgcgtcatccactagtatcagctaagcgttgggtcctccatatagaacaagacgatggtgaggcgttcgggttcaggcaccccttgatagtccaagaactgcaatattttgaatacccagcctaacaagtcctagccatca

SEQ ID NO: 303351 - DNA, 393 bp, Glycine max
agcttgaaggtatgagacgatgagtggagtgagagggagagaaggagcacgaaattttgtgcctcaaaagaggtctgaactttgaagtgtaattctcaaatgatcaaagttgaaaaaattcacacacatggcctctatttatagcctaagtgtcacacaaaattggagggaaatttgaatttctattcaaatttcacttgaatttgaaattgaatttgtggagccaaattttggagccaaaatttcactaattatgattagtgaatcttagttatggttcagcccactaatccaagatcaagtccaagattgtccactaagtgtgctttggtgtcatgaggcatgtaaagcatgaaggacatgcacaaagtgtgactatatgatgtggcaatg

SEQ ID NO: 303352 - DNA, 432 bp, Glycine max
ttggctgcgcagcagctctgaattcgtgagtatttattgaagatgacgcattgtaatcgattacaggtattggtaatcgattacaggcccaataagccttctggtaatcgattacaggatgttgtaatcgattacaggctgcctgttcatgtgtaatcgattacactggatggtaatcgattaccagagcctatcctaggctagtttctaagagaatatctatatttatgctcaaatacatcctatatgactaattttcactactaatacactaaattcaatcattcaattactatatacacaagaaatcataaattctatcataaagacaagaattcaaacaagatcaaacaaaataatctacaatcaaaaggtaaaaagtaaatcaaccaatcaatcaaccaatcaatcaaccaatcaattcctattttt

SEQ ID NO: 303353 - DNA, 345 bp, Glycine max
  unsure (1)..(345): unsure at all n locations
agcttgtagattgctccagaatgaagaaagcctcatatttaaagttctgaaagttaagtatttcctagattaaacctgtttttgaagtaaaattgggccattaatttgtggagatttctccaagggaggattaaacacctgaacttattcaagttaaaccagctaaattgatatagtgattttttgtgtagaccatatgcaatttgagcttacaagccagtttagccagggagagaactcccaacaaaatctagctagctataagggtgttggagaagtggtgaaaatattctttttttaatgaataattataatattctaaatcttgatttanattgaaatata

SEQ ID NO: 303354 - DNA, 430 bp, Glycine max
tcccaataatcacttataagagaagaatataaaaatgttaaatgaattaagtttctccaataagttaaaattagcttaagcataagttaaaataagattttggagaaattaaatgagagttcctacaatttagcttatgcaaaactaattttaacttatgaaagaaacttaatttattttactttcttattttcttctcctataagtgtttataaaagaagtttatccaaacaaggtcatatcaaatttgcacaaaatcattagcatagaaaagataactataagaagaagaaaatttaccaagttctgccaatagtgataattatctgtacacttttcatgcctccaagcatcaagattaaatatattcatgccataggcccaagcacaagcttttggattgaagctctccttgattaaaggatgagag

SEQ ID NO: 303355 - DNA, 360 bp, Glycine max
  unsure (1)..(360): unsure at all n locations
tagctttataggtcatgcaagacctgttattaaatcttgaagctcatcatgggtatgaactgcaaggtaatcaaatgtttataggaagattgattttgcctaaatattgaccctatatccctttactttcatttgaatttcataacttatccatgggatgacactctctggacctctggtttcttttgtacctacaaaaggttanctaatttggtgtgttaccaaagaatgaagaagggtattcataaatctgttgcaacctgtgacacttttcaacacaataagtatggcaccttgtccttagtctatcgctacaacattggatattcctacacatatctggtctaatatttctatgga

SEQ ID NO: 303356 - DNA, 431 bp, Glycine max
  unsure (1)..(431): unsure at all n locations
ntcacctatggaagaagaaaaaattgttccattcatttgtcaagcaacatgttgaacatttaggaacttattttaacattgcaacaagataatttcaattgatttctaattaaattgttcacacacacacacacacatatacctttttttgttatatgcaagctaataggacaaaaaacagaagaatattcaggtatccctgataatagttccaacattgagaattagaattgttgatgaaacaacattgagtcttgcaatgaagagaaattcaagaaataaattcatataagtgaagttgattcatgttagttgtgagagtttttgcgttttgaatttttaatctttaataagtagagtctttgctgttacagacttttctccttctttttctgttttttagttagctattgatataccaataaagtctt

SEQ ID NO: 303357 - DNA, 337 bp, Glycine max
agcttatgtgtaactactcttgatattttttaggctatgtgtttaaatttttttaaaacaaagtagattcagaaaataattacatttattattattttgattaacttctgaatatggtgtaaatcttatgtgtgtctgacatattaaacaagttaacgtctaatttatttgattagaatatgaatctgtctaaccaaattaagatgtttaataagtaagtttatttaagtattttatacttcatagcttgtaaggcattacttatatatcgcatataggttcgcaactctctttttatacttcttatcattactattttaatacaccttcctcttat

SEQ ID NO: 303358 - DNA, 410 bp, Glycine max
  unsure (1)..(410): unsure at all n locations
tgaggggggttttaaattaatgggtgtgacttatggttattaaatggttatgttcgactcggatgctaaccgatagaacgacatcaatggaagaccgtggatgatgttcgattattatctnatggttcatccatggacttcaaaatttgtggtgacagaagcaacaatagaccaaaccttggcttggatccgttttccaagtctttggatggtctatcatgatgagactgtattactgaccttggcatcaactattgcaacacccatcaaggttgatctaaacatcttgaatatgcataggggaaagttcgtgcgattatgtgcataaattaatctcaatgtccttgtcgtgggagattttgcatcaatggaaatcggtataatatagaatatgacgcgcttcatattct

SEQ ID NO: 303359 - DNA, 345 bp, Glycine max
agctttgttctctgcatgtcttcacacagcaaaatctctcaaaactctctggattcagacccttctctctctagagtctctcacatgcagaagctccttgagaaaatggctaaaatcccagaacttgaacctctctttgtagaatctctcacatgcagaagctccttgagaaaatggctaaaatcccagaacttggacctctctctctctagaaatctctaaaaaatacataagctcaaggaaaagcccacactcctctcaaaatctgattcaggcttaaatagggctttgttgtgttgacgcttatgaactctgaacgttatcgccattatggatttggttaca

SEQ ID NO: 303360 - DNA, 436 bp, Glycine max
  unsure (1)..(436): unsure at all n locations
tctcccgcaattntctataaataaggggagaagtgaagtggtaaaggtttcagccccttaggcacttctctctctttcgaatttgtttagaaaaattgtttccgtgaagaaaatccaagccgaggtgcttccgtaacgtttccgtaacgtttccgtgagtgatttcgcgaaggttttcgaccgttcttcaaccttcttcattcgttcttcatcgttcttcagtcttcaacgggtaagtacctcgaaccaagcttttcgattcattctatgtacccgtggtggtccacatttggtttcatgtatttttattctcgtttcatttactttttatacccccttttgacgtgcttaagccattntatttaagtcatttctcgcttaacctaaaaataaaataaatttccaccgatcgtttgaattgtattatccgttaact

SEQ ID NO: 303361 - DNA, 381 bp, Glycine max
  unsure (1)..(381): unsure at all n locations
agcttcttgttttttgcattaaacgacaagaaaagatactagtatatgaatacatggctaatggaagcctacactcctttatttttggtacgtaatatgaagaatgctttcataattcgattaagtggacttgcatgtttgcttgtttggtttgctttttaattccagtcacaattagcggctctttaatcttgaatatcttatattgaatgaatagcttgctttgtcaaatcacagataaaataaagggtaaatttctggattggcctcgacgcttncacataatatttggaataactcgaggacttctgtatcttcatcaagattctcgattaacgattatccatagagatctcaaagcaagtaacgttttacttgatg

SEQ ID NO: 303362 - DNA, 382 bp, Glycine max
tatcgtaatcgatgtacacaacttggtgttgagacaatgtttgtttcattcaggagtccctgctttaattaattaccatgtgatataatcaattacttctctttctataagtgtttcacaagtgacccaaaacactttaatcgattactttgaggatctaatcgattacattattcttgagaggtttccaagttttgggaagaagactttaatcgattgaaatgataatataattgattacattgtagatttaattgattacaagcagatattacttttttctctctatatacccatcttgtgttctcacttctatgcacaagttcattaagtgccaaaatgcatgagttgatataagcgataagcgacgtgtgatactttc

SEQ ID NO: 303363 - DNA, 347 bp, Glycine max
  unsure (1)..(347): unsure at all n locations
atagcaagatgaacagtgacatgaattgctgttgatgcattatcatacaaaaccctgaaaacctgtttaaaaatttattaattggcaatcccttcaattgagagtaatatcaaacataggacagacaattagtatgaaactgctgaagtaatcaatttatgataatacatatggcattagacattcagcaaagttcacgaatcataaaattcccaccagaggaaagtgcaccttctgagccacagctaaagctgcctcgtctcgactaacacatctaagtatgatctcacgaacctcagaaatgacaccctaaacatacgaacncaanacagatattaaaacgtgga

SEQ ID NO: 303364 - DNA, 436 bp, Glycine max
tccatcatgtaaattgcttatatttcttggcaattcctgtctcatgatgagatagattatgtccacatgacgtaacagaatttgcagaatgaaacatggaaccaccagcaacatccttttctatgtacaattctagaactgacatttgttgttgttgttgaaaactttcgatcatagtttcaacatcttcgtcatcacaaatttgcaaggcgacatattttcctaaaactaaaaatctacaacttatagtagaaatgatttcattattttctaactttcccttatctccaattttttttcaaagcattgaaactaattccgcatttaatctgaattacctttttactgccttcaaatattacaccatcattgtcttcatatactcttccgttgaaatacaacactgtaataattgaattcatgatatatctacatc

SEQ ID NO: 303365 - DNA, 367 bp, Glycine max
  unsure (1)..(367): unsure at all n locations
taatgacccactaacctagaattaaaataacttaatgccattaacctaaggaattaaaaaaacttaatggctgagtgtaactgaaattgtggcaaccaaaagtcacccccaacagccaacaagtcagccaccatttggtctcccaaaaggctgatgcctacgttgccaattgggcccttattacaacttgaactaaacctaactaaagccattttaattgattaacccaaaacatatttttggtcagccaactttacaaggattgggccattatttatacaaactaaacactctaaaattgaaacaaagtggtgtcatttagtccttcttcatttgngccatgatacaactcacaaccttggacttt

SEQ ID NO: 303366 - DNA, 436 bp, Glycine max
tgccttgccccttgatatatttgagggactcatggtcactatgaatgacaaattccttgggataaaggtagtgttgccatgttttcaaagcccgtactaaggcatacaactccttatcataagttgaatagttaagggtaggaccacttaacttttcactaaaataagcaattggatggccttcttgcatcaacacagccccaatcccaacatttgaagcatcacactcaatttcaaaagatttttgaaagtttggcaacgcaagtatgggggcattagttagcttttgcttaagaacattgaaagcttcttcttgtttctctccccatttgaaaccaacatttttcttgagcacttcattgagaggtgctgccaatgtgctaaaatccttcacaaatcgtctataaaaacttgctaagccatgacaactcctcac

SEQ ID NO: 303367 - DNA, 359 bp, Glycine max
  unsure (1)..(359): unsure at all n locations
agcttcttttggaccttgaacaggcaatcaactcctctttcagaaccatgctatgtgctcgcgactggtccctttcttcccttcgcaacttgagttcattattgctaccccatagagctccgcgaaatttgttccggccatactcttccttgcgagccctcttggtctcttgttcaagggctcttgcggtaattgcattctcttcccgtaacccggcaacttgcatattcaataaggaattttgattggtcttcattgtacaatctatctctttcaagagagatttcttcttctcttcttcttacttctgacnagggattaagagaccgagagtctcttgctgtacaggattcctgaca

SEQ ID NO: 303368 - DNA, 425 bp, Glycine max
taattaactaacaacttgttaaaaaaatataataccaatgttgccacgctacagacatattcaacggttaccaatccccattgaagacgcgtgggggaggtttggattgggctccacctattttcttcgatcagctaggaaaagctggaaaaggtcttcatggggctacccatttttgtcttggccttctttgtccatattccaggttttattaattaatgcccccgactaaactcttttaattcaaactattcccgctatctcctaaacctttctccatttgattttgcttcagcatttttctttcactcatacatgcatctgatcatcaagggtatctagttcaattggctgcttaaaatgtgtgaattgttgtaaatcttgatattcgtcttggatttccatagatatcacacaagatacat

SEQ ID NO: 303369 - DNA, 268 bp, Glycine max
agatttctacagagagagagctccaagttccagggagttcgggcttctccttgagcttctacatttgtagagatttctagagagaggtccaagttccacggagtttgggcatttctcgaagcttctgcatgttcacagatttctacagacagaaaggcgcaagtctcagagagttttgagagcttttgctgtgcgaaaactgcccgagaactgagcttgaagagaaagccatcctgacagcatgagatgagtctgtgactgattgcga

SEQ ID NO: 303370 - DNA, 423 bp, Glycine max
  unsure (1)..(423): unsure at all n locations
ctgttgcgaaggtgcccaaaccgtaactttgatgatgctgcacaactgcatatcttttatagtggttcgaaacctcaaaccaagatgatccttgatgcctcagctggaggcactatgatgtccaagagttcggaggaagctattaatgtaatctccattggagcttgtaggactaggatattcttcatcaatggattcctttgcttcttggaagatgaatgtcagcggaatggagaaggaagagagagaggagacgccacttcaaggagaagatgagtctagaagaagctcaccaccataagaggccatggataacagcgtggaggaagaacgagatgaatgaagggagagggagagaagagcacgatattttgcgctcataaagagctctgaaatctgaagtttaatattcanatgatcaaa

SEQ ID NO: 303371 - DNA, 301 bp, Glycine max
agcttgttatttacatgtcccaaccacaacagaagcaacgaaccaactactgacgagccgataacaaaacacaactccctccccaaataatcacaacgtcatgacgctcgcttggcaactcccacaaagaaatccccctttacatcacttactggtgtcatttgctcccacaacaaaggttcggatcatcaacgtacaaccacacggacaaaactcaaagatgacctattctaaacacatcaacaagcgtagatgacgataattcaacgaactatgtcataatataatccactcataatca

SEQ ID NO: 303372 - DNA, 423 bp, Glycine max
  unsure (1)..(423): unsure at all n locations
tcataaaaggtgacaaaattgtgttcataacacgtttcatgaattntttcgactctcgtatctttagagaagggaaccaaagtgccgatctcttggcaaattatggtcttcatgcaagtgatcctatttggtgggatcatctcctccttttattttcttaggcttttatttgtaataaaaggtttttttttttaccagaatttaggtcttgttgagtctatttgcatgggttttggttattatagtgtggtatatgattactagattatattggtgtcaacataattgggattagttaatatgttgtgatgttgtgcacttcaataagtttataaaaaaatcattttacattaagatgagtcatctaattattatttataagataaatagccaacatcatctttgaaagtgtgaagtgctaat

SEQ ID NO: 303373 - DNA, 431 bp, Glycine max
  unsure (1)..(431): unsure at all n locations
tctgaaggctcaagatacaatgaaaaagtatgttgtctttctttgtagggatgtggcctatcaacccaatgattgggtcctggtgaaactcaaaccccaccgataattaactgccaaaggacctggaacaagttcgggtaaacaggacaagctgttttatggctcattcagagtgatagaacgcattggggcggcggcttatcggctccagttaccagacggtgctaagatacattcagtcttccattgctctctgcttaagccattcaagggttcaccaacacaatctgaaattgcatccttaccagcacaattcattaatggacaacctatgatttctcctctcgctatcctcaatgatcataaggttccaggatcaacaccagactcctgngaagttctcgttcaatggcaaggtatgtcaccagata

SEQ ID NO: 303374 - DNA, 359 bp, Glycine max
  unsure (1)..(359): unsure at all n locations
tgtttatatgcattatcattattataccgacacgtttcgaatgaaaggtagagaaagtgtgacagactcacagtgagaaggagagtgagggaaaaaagaagccatgatgataatctgaattgctagctgtggacgcttgggatgggattgaaatgataaattatgggtacgctatcggcaatggatcagcctctccaccaccttctctcaatttgtaatacataatcangaacacgcatttacgattggagtattggacctcttttttcacccgccccaatgaaaacgtggcttggtgcacttgctctttttttaatggacaaaactacgcgctttgttctgattttctatattccgct

SEQ ID NO: 303375 - DNA, 433 bp, Glycine max
  unsure (1)..(433): unsure at all n locations
tctatagaaggttcgttcctaatttctctacaattgcattacctctcaatgagctggtgaagaagaatgtggcatttacctgnggtgaaaaacaagatcaagcctttgctttgctcaaagaaaagcttactaaggcacctgttctagctcttcctgacttttctaaaacttttgagctagaatttgatgcctctagagtgggagttggagctgtattgttacaaggtgggcaccctattgcttattttagcgaaaaacttcatagtgccacccttaactaccccacctatgataaagaactttatgccttaataagagccctccaaacttgggaacattaccttgtttccaaggaatttgtcattcatagtgatcatcaatcactaaagtacattagagggcaaagcaagttaaacaagaggcatgcaaaatg

SEQ ID NO: 303376 - DNA, 393 bp, Glycine max
  unsure (1)..(393): unsure at all n locations
agcttgtaatcgattacacaaggcttgcaatcgattaccagaagtttttgaacgctctaaaacagcctttagaaatttgaatttaaattttaaagtctgtaatcgattacagaatgtatgtaatcgattaccagagttaaaattcaaatttcaaatgtgaagagtcacaactctgcagaaaacaattgtgtaattgattacaccattttggtagtcgattaccattgaagaattttttaaaataactcccaatagtcacatcttttcaaatgattttgaatggccatcaaaggcctatatatacgtgacttgcgacatgaattttctgagagttcttctgaactganatgtcttatcctctacaaaagattcctcgtctaacacttgatattc

SEQ ID NO: 303377 - DNA, 430 bp, Glycine max
ttgacttgagtcatcaagagattataaatatgtgaccatggcatgagtttcaataatgaccaatcatcaatcatctttgaatcatctatctttcaatcttttttcaacatcatatctcaaacatctttcaatcgatctttcaatatctttctacagaattttctgatttatttctcttcatctttctaaaagttttttatcaacactttctcttccaagaaaagttctttgttcaaaaacttgtgctattcatctttttcattctcttctcccttttccaaaagaatgaaggactaaccgcctgaattcttttgtttctcttttctcccttacaaaagattcaaaggactaaccgcctgagaattcttttgattcttcccttccccttaagcaaaagatttcaaaggactaaccgcctgagatatctttt

SEQ ID NO: 303378 - DNA, 381 bp, Glycine max
agctttactactgtgcaggattaagacattactcattacactttgtcattcatttcaggtctgggatcttggcggacaagaaagactgaggacatcatgggcaacatattaccgaggaacgcatgctgttattgcggtgattgacagcagtgatagagccaggatctctatcataaaggatgaactttctaggttgctggggcatgaagatttacaacattctgtcattcttgtctttgctaataaacaagatatcaaggatgctatgactcctgctgagatcactgatgcactattccttcacagcatcaaggatcatagatggcatatacaagcttgctgtgccctatcaggagaacggttgtatgatggtcttggatg

SEQ ID NO: 303379 - DNA, 390 bp, Glycine max
atgagtgtgtatgatgtacactgatactgtgacttgcctttgtagcactctgatcgaatatagttgagtccacctgtctcaaactcagcttaataatagtcgattagcttcagttactacttagtgggatctgctaagccgcatataaattaatgcttaaattaggaataactggatttaagttcactgataatcctagtttaggtgcataaactatgtatggtaattggtgagttcagagtacatgagcaaaacgttaaataaaagtaagtcatactaaaagtattaaacaattgtgtagtgaagttaacctatttcacctttcactaatcaaactttaatccagcttcagattttgagctataagtggtgcttcaaggataagtcaat

SEQ ID NO: 303380 - DNA, 103 bp, Glycine max
tacggctaccgttgatcatcgaatacatgacgtaatgcatgtatcttaactgattaaggctgtacgtgaaggcgttcttgtctccgcttctagcttagtagag

SEQ ID NO: 303381 - DNA, 69 bp, Glycine max
tttcgagaccccgaaacatccactgacgcgatctcttgctaacgcaaaaatataactacctccaccgat

SEQ ID NO: 303382 - DNA, 141 bp, Glycine max
  unsure (1)..(141): unsure at all n locations
agttttctagttgagtgataagccaancagcctagggaatgacgcattaaaatattcatgctcgcccgaatgattgcgcatgggagagacattagctacgcgcaatgcctatatgacctatgagtgaggcttaacgagcct

SEQ ID NO: 303383 - DNA, 373 bp, Glycine max
ttcaaaatatggctgcagcttttggcttttccaaacttgcaggtactactatatttattgtattctagtgtcaagaatctcataattaaatattttctcatcttatgccacatatataactaatggggatggtcatttgtatttggtaataagactcaacaggtgtggcaaaagttgtaggttaaggtggacgaactacttgaggcctgatattaaaagagggaaattttcccaagaagaagaacaaacaattctggatctccatgctgtccttggaaacaagtaaatattcaacaccactatagcacctactatttaatgtgttttgatgttaattatatccttaattaaaagactgctcattattatggat

SEQ ID NO: 303384 - DNA, 444 bp, Glycine max
  unsure (1)..(444): unsure at all n locations
agcttataattacatttttgcctcaatcatttccaaatatgcatgtgaattaagacgcatcagcaagaatcaagccaaggctattgtgcaagcaatcaatggggcaaaacacaccaaatgattatgatgatggatggctcaaattctcacaaaggtaaactcatcactttcaaattgagctttcaaaactatcatgacatgtagagaagaatcaaggatttcaagtcacaaaatgtcaagaactcttattgtcaaaacaataacccatttcttgaacatatcctataattcatagaanaacatgcatagtcgcacgtgcacaaaaaattgacccaacatatgaaactaaaaatccgacgaaactgacaacattaacaaattaacagattaacaaaactagcagacacaaagaacactcccgcgcccccatacttaaacaacaca

SEQ ID NO: 303385 - DNA, 417 bp, Glycine max
  unsure (1)..(417): unsure at all n locations
tgcctgtccgatgcagcagtaatgatggcccgagttatgttgtgtgaacggttacgaacccggaatgggtttaggcaaagacaacggcggcattactagcctgataaatgccaaaggaaatcgtgggaagtatgggttaggctataagcccactcaggcagatataaagagaagcatcgtgggaaggaagagcggtagtcaaagctcgcggttgagacaagaaggtgaaggaagcccaccctgccacataagtagcagctttataagcgcgggtctgggggatgaaggtcaagtggtcgtgatatacgaagatgatgttccgagtacattggatttggtacgaccatgccttcctgatttccagctgggaaattggcaagtggaggaatgccncagcatttacgcaacgagcataat

SEQ ID NO: 303386 - DNA, 438 bp, Glycine max
  unsure (1)..(438): unsure at all n locations
agtttgtaatttattttatgaaagccattcaataatatctaaccattttccaatcgtgtttatgcatccatatacaatacatgtgtcctgatattccttaattgcttattgactacaagtctacaacgtcaaccacatacattttccttcgatcccttccatccaaaggaaacaaaacataaaagtgaaggcataaacaagaacggaaatggctctacaacaataattctatatttacgtacaagcaaagaatgcaacatcatcacgaatgtattacttggacgtgaactaactcaaaaacaatagtgctagaaccagattanagctatgtacgtcatgatgaagaagaaattatatatgatatgatatcatgcgttatgggcacagaagatcgttgcctggcccaccataatataagcatgtgccacattattacta

SEQ ID NO: 303387 - DNA, 430 bp, Glycine max
tatggaaatatataatgctagtggctatcactacctttataatttatgttcaaaaatctactcctctcagtttagagatgatgatgaaacttgaaagttgcgaccatcttatatcatcaattcatttttttattgggaaaaatttaagtgagttggattcgagagaactcattaggattagaagagactcaagactaaaaaacgcttacaaattactcaccaaacaaggttctaatatcaaaagcgaaaatcgaactcacgtttttgtgggatatgagtttcttccttaccaattggaccacaatctgttggcttatatcatctattcataaacctatggcaatcgctccactaattggtgcataaaaagtgtataaaaaagaaagttcggataagatagagcaacaaacacggtgccgacacttcttaa

SEQ ID NO: 303388 - DNA, 436 bp, Glycine max
agtttgatgttgacacaaaagtctaatatgtttgatgcacctttcaaatacatggtgcctgaagatgtcagtaatcatgctatggccatcttaaccaatttttttttttttgcaatctgcttatagctgattttattttgattcttttgtttctagaaggaaattcccgacagacctttgccatcacattggactccttctatgcaggtgaaaaacatattctggtttgaactttgatccaatttgtgttggtatcttgatcatgcacacttgtgtttgtcatacataaaaaggttgactctgtacatctctcttttaaataggcatataacacttgtgggtctactccaactccctttttaaatcaacaggcagctggttctcacatgcctctctacatgtgggtaaatcatgtactgatatacataccattgcc

SEQ ID NO: 303389 - DNA, 435 bp, Glycine max
tgcagcacactagcaaacgtagaattatttggaacattagatgtttgcctcattcgacaaaacaactccaaagcctccctacttttatcactctgagcataccgcgctatcatgagactccaaggaataagatcatctttcggcatttcttcaaaaaactgctgcgtctcagcaatctctccagacttggttaacaattcaagcagcacagtgccaacataaagatccctatcataacacgctttcaaagcacatccatgaacacttttcccaacctcaaaattgttcggtctaaaccccataaccctcatctggcagaaaagtagcaacgaatcttcatggcagtaattctcagcatagcaagccatcatcccagtccaagataccatgcccttacaacaaatcccatcataaacttggcacgcagcgataaca

SEQ ID NO: 303390 - DNA, 441 bp, Glycine max
  unsure (1)..(441): unsure at all n locations
agcttgtcttgcaccttttgtggaatcctttaaccagaatacctttatctttttccctaaattattaatgaataaattgcttgttgttttgagattaaatgattgtttctttttggccagtctcttaaattattttcttattgaattttttcttttgggcatcattcagctcacttttggcatcccaggctcatagaggaacttaatttaatttgtttgtcagagtatagttaagtttgcacctacatgttttactttaaatcttatgcaccttgatgggaattataactatttaatttgctttatggttatttcctattgaaaattattgtacattccctttaacagcttatcatgtcttttcttaacggtatattcatttgttgcgggcctgcgatgtggnggtgtattctacgtgatggaaattcttgtccatgatct

SEQ ID NO: 303391 - DNA, 431 bp, Glycine max
  unsure (1)..(431): unsure at all n locations
tgataatttccacatctaaaatggtggaacttgaggtttgccaagtgctatcaattgctagcttcgtgttcttgctcatggaagtgatagggaaggtagaggaattggtgaaagaggtggaggagctcgaagacattgctggttttcgcaccaccacaacttcattgtcttcgtagaacccatctttgtatacaatgatattatgtaaaaaccacttcccaattttgggtcatgagttagaaatatgtgttttcttggtaccaaaaaaaaaaacacatttttaattagaaatatgaatttgagtgtatcatccaaagtatagtaattgaggtcagatgcaattaggtatttaactgtgtttgtattaatgaaaatganaacattactgaagtgtcataaccggtaaactgaacctagacgcaacttttcca

SEQ ID NO: 303392 - DNA, 424 bp, Glycine max
  unsure (1)..(424): unsure at all n locations
agtttgggctaagcgagtcagtctcgctaagcccaaagcaatttagttttccgagtttttgttcatgcgctaagcgagttagtctcgctaagcgcaatttcttctttatttttgaattaggcttagtgagcttgctcgctaagccaatcatgttccagtggtcaagtttggctaaacgcttgctggcgctaagcctgtgtagtgtgtcgtgctaagcaagtcagtctcgctaagcgcaattagctctctgtgagagaataaggcttagcgagccatgctcgcttagccattgtgttcgtttagctaagcgagtatgtctctcttagccagagtctatngttttgtgttgtcgcgctaagcgcgccttgcgcgctaagcttgagctggtaatttcataaagcacgctaagcgagatagtctcgct

SEQ ID NO: 303393 - DNA, 418 bp, Glycine max
  unsure (1)..(418): unsure at all n locations
tgcttgtggggcttctatgaaggctggatctttgagtcttaatggggtcctttaatggtgattttcctccatggagatgcagcggaagacaaaggagaagaggtgagaggaggtgccatccactatggaataagccatggaagaaggagcttcaccaccaagatgagccttggataaaaagcttggagaggatgcttcaatggaggaaaagaaagatggagagaaagagaggggggtgggggagcacgaaattgaaggaagaaaagagggagagaagttgaactttgagttgtgtctcacaagactctcattcatcaaagttacaacaagtgttacacatgcttctatttatagactangtagcttccttgagaagttttcttgagaaaacttccttgagaagcttctttgagaaaac

SEQ ID NO: 303394 - DNA, 534 bp, Glycine max
  unsure (1)..(534): unsure at all n locations
ntgactttgagttgtcgagtngcacnncacnngnaaccggcacccgcgcaagcagaccagctagaangcaactcttcgcatttcagttgtttccccgcgccacacaacaagatcacactgtgttgaagatcagtcaacacacgacggcagaactgaggcctgtatggtatacgatgcacggctacacaattgggcgcaaaaaccacacccaacagatgtctcattgatgcgctcgcgataaatactccccatcgtaactcaccactgttcaattgaacctctcaacccatacagacctggcctcaaaaagcacagatttcaagtcacccaatgccaatgacatcgatgtccagtacatgtaatcgattaccgaagcacacgaataagtgtaataagatacacataatactgacccgactaccagagattcccaacgctgggactttaaatcatcgctgcgtgacccttcacacacaccgaatcacctaactgggacactatcagaatacctcgccctctccatcatttcaaacg

SEQ ID NO: 303395 - DNA, 434 bp, Glycine max
  unsure (1)..(434): unsure at all n locations
agcttgaagtgatctctattctgatgtgtgtggtccttttgaagtgaaatctctaggaggtaacagttactttatgtcattcattgatgaatttactagaaaaatgtggacctatctcattaagcagaaaagtgaagtgtttaacatttttaagaagtttaagctgtcgagtgaaaaacaaagtgtagatgcaattggctttgatgttttgatgatgatcatgatgatgtgttgcaattgatgcaaatgggcttttcaagattaaaattcaagacaatacttcaagattacaaggcacaacatcaagatgatcactagaatattangaagggaattcctaattgaattagcaaaggtttggccaagtgatttacaataaaaagtgtttttcacagcttttactctctggtaatcgattaccagacgatgtaatc

SEQ ID NO: 303396 - DNA, 419 bp, Glycine max
  unsure (1)..(419): unsure at all n locations
tgtattttcatcaactctggagaacatgttcataatttcctttcaaaattgtattctatagagtccaacaagcatgcaataggaatgcaaggtgtggtattgtattccaaatcaaaggattcatctatgttactcactcatggtcgagtaaaacaatatctgttgagtgaaaatgtaattcaattgtccaagatataaacttcttcctgaaagcattgtatgaaggaaaaattagcaatcaaaaaatgaagcattcttataatctacatctccatctggcatcaatgtgttaaaaagaaatcatcacaacttgataaaaaccttataacaagagccccgcatatccactttgtatatcacgtatatggtatataccaaaagatcaaaattaaacaaggaaacagtaatgaanaaagtac

SEQ ID NO: 303397 - DNA, 386 bp, Glycine max
agctttgagccaaaatcctaactcaccataaaccttgacccagggtgagaatgtcaatccttaccctcggaagcaaaaaagaagagaaggaaaatttccaatcaaagaaaaaaaagagaaggaaaatttccaatcaaagagaaagcaaaaaaaggagagaaggaaaatttccaatcaaaggaaaaaagagaggaaaggaaattcccaatcaaagagtgggagaaagagaaaagaaaagaaagataattcccaaccaaagagtgggagaaagtaaaaggaaggaaagacagctcctgatcaaggatcgaaagatatcagaagacatgtgcaaaaaggtctttggaccggacaatatctgtacaatacagaattgtcaccaaatgaac

SEQ ID NO: 303398 - DNA, 241 bp, Glycine max
  unsure (1)..(241): unsure at all n locations
ntacatgcttgagcggactcgttcagtgttccatttgtttgaacggcgctgccttcctcatcttctcatccctatttctctttcaaccacctgtacacttccagcgatgttgatttactgtggggcacacattacaaaccgaagtagaagacctcagctagctttgtgtcaacctttgatagaaacctcattcggtcagctcgtgtgtagaacgctatggactccaccatagtcttcctct

SEQ ID NO: 303399 - DNA, 430 bp, Glycine max
  unsure (1)..(430): unsure at all n locations
agcttgccacaccatcgcgattctaacccaaaccccttccgggctcgtacttgtgccctaacatcacgcgggctaccatcaaagcggcgctagacgagcgtggttgcaccggggagactcaacataggcgttgcttaccacttacaaagcttggaaggacgtctctaaggattcttcgacggcttccacatatggtgtagaagagggacaactcacaacgatgtcttcctccccggagactatgattagctacccttctaccacaaacttcaatatttggtggagcattgaagggactaccccgactgagtgaatccaaggccggcctanaaggcagctataggccgggttgatatccatcacttggaacatgatatgacagatgtgcggtccaatctgaattgggagatcaatctcgccctttacgtct

SEQ ID NO: 303400 - DNA, 427 bp, Glycine max
  unsure (1)..(427): unsure at all n locations
ttaaatggagctacattagttgtttcactttcattttccaatctaggtaggcctcaacattatatttatatggaaatatgggaggctaatgctaacctcttgagaccttttatccttttctcttctttgggagcgaggtcttgtatggaacctatgcctccctccatagtagtcacttaactcttcactcaaacttttacaagtctcatgactaccataggaagcatttctgcctcttcttaattctttcattaattttcttctttcttcctctcttattttctctctttcatcttgtcttatttcttccactcttttgttaccttttcttttctctcttgtttttctttccacaacttaagggatctcaactcatctaatatcttatacaaggggtccttangagtagaaccctcaccattaatgc

SEQ ID NO: 303401 - DNA, 428 bp, Glycine max
  unsure (1)..(428): unsure at all n locations
agttttgatggtgtcgagaagaaatcacatgtttgtcatcatcaaaaagggggagaatgtgaatgtatgtatacatgattttgatgatgtcaaaagaagaatcaaacaaggctcattttgcttcaagattaatacaagattttttcaacaaacaaagccttgattcaatatttcttcaagatcaagccttgcctcaaaatgtagagatttcaagtcatccaaggcacatgtaatcgattaccaatacatgtaatcgattaccaaggcacatgaaagtgtgtaatcgattacacatcatatgtaatcgattaccagagactctgaacgttgggaattcanattataactgtgtaatcgattacacaaacattgtaatcgattaccagtggaaagttttcagaaaatctgccaacagtcacatcttttca

SEQ ID NO: 303402 - DNA, 414 bp, Glycine max
  unsure (1)..(414): unsure at all n locations
tgtctcagcggtnatgcgagtattagacctacatgctagctatcatcgccaagtaccaagaagagttaggtctagccgcggcccacgagcataggattgcggacgaatatgcccaagtatacgcggaaaaagaggctagaggaagggtgatcgactctttacaccaagaggcaaccatgtggatggaccggtttgctcttaccttgaacgggagtcaagaacttccccgattgttagccaaggccaaggcgatggcagacacctactccacccccgaagagattcatgggcttctcggctattgtcagcatatgatagacttaatggcccacataattagaaatcgttaggacacttgtatggtctctcagaccttgactagatacgacttcccttttgaaatanaatgagttg

SEQ ID NO: 303403 - DNA, 427 bp, Glycine max
ttcaagacgacgaatcaagtcgcaccaagccgctctgatgaccacaaacacgacgaccaaaagcccaacagaatgatgccaagaccgactcaacacgcgcaagaacaagaacaacctcaagcttcatgacaagaaatcaagacgttggatatcaagactcacgagacgacgaactcaagaatcaggagaatacatcaagaagactccaccagggacgtaccgaaaaaaatcctcaaaaaacaaacatagcacagctccgcgtctaaaaccgggcccacacaattgactaaggtactagacgactcactctctgggaaacgaataccatcgacctggaatcgactaccacgggccaagcttgaggcccaaagcttctaaccgaacgggcaatggctcactacgacgttaacgggcgccaccgaccccg

SEQ ID NO: 303404 - DNA, 367 bp, Glycine max
agcttgcaattgtcctttcactatggagggcattactaatcagcttgagcatataatatgcgagagatgaggcctccaagctccaacaatgttcgactggtcgcagcgaaggacaccatcatacatgccatcaagatcatttttcttgtctgaataataccttgttgatgcttacagggctggtctgcaggaagaatatgctggccaagtctgtttattcaagccaaaaatcatgacataagctcggcacatatacaagatatcacactgcaatggaaggctgagaggaatatgttgactaacaacacgagttacatggctgctgacaatgttaacatagcagcaagtacacaagatcagtggaagt

SEQ ID NO: 303405 - DNA, 431 bp, Glycine max
tctattattaacagtttagttctagtgcactgaactttgtttattagcagtttgattaataaaacttaaaacagtttaggtttagttttttataaaataattcagtttttaatagtttaattcattttggtattaaagtagttcacagatcaaaataattttttggacacccctaaatactttccatttgataatggcataatatatgggagaatttacataactcatgaatgatacttactaggcctactgcaatgtcaaggtgatacttgcgtcctgtagtgtgcactgctccaccacgactagaagtccggttaaaattatcatttatcacatcacctactaggaatttagaagacactcagtataaatgctaaaagaggaagttaaatgatatgaagataacaaattagatgatctaaaacgaagca

SEQ ID NO: 303406 - DNA, 429 bp, Glycine max
  unsure (1)..(429): unsure at all n locations
gtntttntttttttttttacttttaaaagntccttctttgaagtttttttttaaatggaaaacaaaacaaaagaaaaaaaataaatgaaaatttttgtaaaaaagaaacttataacttcaaaatactaagattaaaaataatatatatatatatatatatatatatatatatatatatatatatatatatatatatatatttgaagtagtaaataaataaaaaattaaattgaagttgtaaaaattttataactttagttaaaaaaaaataataataaattataatagatgttaaatcttttaactcacaccttataatactatttcattttctataataattttagaatcaatcctaaataaaaaaattacacccgtctaatataattgaacagagagggttcacctttctctcactctgtttcacaa

SEQ ID NO: 303407 - DNA, 440 bp, Glycine max
  unsure (1)..(440): unsure at all n locations
agtttcttattcaaggcacattcttggtggcgaagctccttcttccatggcttattccctagtggatggtgcctcttctcacctcttttcctttgtcttccgctgaatctccatggtgaaaaatcaccattgaatgaagctcaaagatccagcctccatagaagcttcacaagcaagcttccatcactttctctccctctccctccactcatcttctcctaccttcaagctcttacccatggcttcctatgttggtgagctntttcttgactcatcttttccttgaagtggcgtctccaatcatctttcttccatctccattctgctaccgttaaacttcaagaagcaagggactccattgatgaagatgatccaaggcctatatgctccacattgagttacattacgaaatatacttgtttgacaatgtagacaattac

SEQ ID NO: 303408 - DNA, 431 bp, Glycine max
gtgcggctgacaatatattacagcaccaaggttctattttaggctctcctctcttctctctctccttggtcattttgagctataggcttctcttcttcttttaaacactttttcattatgcaattccagttctaagatttcgttttagcaataaaaattcgttctctattgattaatggaaggctaagtctccagcgctgttttctcttgaggatcaaacacaattctctttgaggctctattattactattaaattctgctcagtttttcctcttcaccaattactctgtatatgttgctatgaattcatgcatgcttagagcttgatgaattgtctatgcacttaatttacgttcatgcttaatgatcgttcatgattaattggtgtatgtgttgcttaatcacataatgaatgccttatgttaaattt

SEQ ID NO: 303409 - DNA, 396 bp, Glycine max
  unsure (1)..(396): unsure at all n locations
agcttctggaaggagttctactagatgttctatgcctcttgaaggtggtagtccatgaggaatctccataggaaagacatttttaaattcctgcaataagggttgaacactaggagaaatagaaatagtaaactcattagaattatgagtagaaattttactgtctttgcaatactgtagattgagtggttcatgagcaggtaacattttcctcacttcactcgcctctgcaaaataattaacttttctctcatgtgtatcactctcttcctcgggtgtatcactctttctcatattcctttgtggcgcctcactattttctttctcttgatctctctcttctctcattctgatttgagcatcacacacttctctaggngatagatgtttaagagt

SEQ ID NO: 303410 - DNA, 426 bp, Glycine max
tcagaattcaatttcgagcgtctcaatagattacggttactcaatcagacattcgagcaaaacattattgtcgtttgaattagctcagagcttcagaattcaatttcgatcgtctcgatatattacgggtctcaatcagacatctgagtaaaaaagttattatcgttcgaatttgctgagagcttcaacattcaatttcgagcgtctcgatgttttatgggacttaatcagacatccgagtaaaaagttattgccgtttgaatttgctgagagcttcaacattcaatttcgagcatctcgatatattacgggactcaatcagacatccgagtaaaaagttatcgtcgtttgaatttggtcagagcttcaacattcaatttggagcgtatacatatattacgggactcaatcagacatccgagtaaa

SEQ ID NO: 303411 - DNA, 267 bp, Glycine max
  unsure (1)..(267): unsure at all n locations
agatgncagttattcttagaccacagcacgacccattaaccttgaagcaaaacacctcactgccattaacctatggaattaacaaaaacctatcggctgagtgtaactgaaattgcggtaaccaaaagtcacccccaacagtcaacaactcagccaccatttggtctcctaaaaagctgatgcctangttgccaattgggccctcattacaacttgatcacaacctaactaaagcccttctacttgattaaccacacacatattctt

SEQ ID NO: 303412 - DNA, 283 bp, Glycine max
tccgaacccggaacataagatagcgcgacgctcgatatagtacaacggacgtgctcaagaaattccaaaggtcataacttttcactgagaggtccaaatatgcaacataatacatcgagaccctcgaaattgaacaacggaagctctccagaaaaacgaatggtcataactctgcacttggatgttagaatttggaacataatatatcgagacactcgtaatagatcaacggacgctctcagaaattcaaatggtcataacttctcccacggatgtctgaatc

SEQ ID NO: 303413 - DNA, 432 bp, Glycine max
  unsure (1)..(432): unsure at all n locations
agcttgcttttgcagtaaagcatgaaagacatgcacaaagtgtgactatatgatgtggcaatagggtgtagtaagcaaatgctcacctccccctctaaaatttaattggattgggcttctaccaattcaattaaatttatttcccaacacacatatcaaatattcacttagtgcatgtgaaattacaaaactacccttaatacaaaaactagtctatgtgccctaaaatacaagagctgaaaaatcctatatttctagggtaccctacctacattatggagccctaaatacaaggaccaaatataatgacatcctagtctaatatgtataaagataattggactcaaccttggcctgtgggctcagacatctaccctgaggatcatgagaaccctanggtcttcttcaccagctatagcccaatcctcttgg

SEQ ID NO: 303414 - DNA, 425 bp, Glycine max
ggacctataaaactcagcttgaggtaatattcttattcggattatggttatagtttttgcaatcatcggagtcaaggtctatgctgcaggtttgtatctagatcaatctgtcacccaggaattgaatgcttggaaagggcaatcaaaagatgctattcaagggaattcttccttgttcgagaccattttccaatgtaacaactttatattcagttttttatttctacaatgctctttgcaaagaggcatgctcagaataatttgataaacatatatgcctttatatgattgcagcttcctttgagaaatcattgcaaattgttcttgtcagagatgttgatggtaaaactttttgcgatgccttaagtgatgccatatcaccaagaattccacaacccacaactacagatgaaactgctttgacc

SEQ ID NO: 303415 - DNA, 414 bp, Glycine max
agcttgacatcttttgatatatcatacaatcagtttgagggtccacttccaaacattctagccctccaaaatacttcaattgaagcattgagaaataataaaggcttgtgtggcaatgacactggcttggagccttgcacaacatcaactgcgaagaaatctcatagtcatatgacaaagaaagtcttaatatcagttttaccccttagtttggtcattctaatgcttgcattatctgttttcggagtctggtatcatttacgccaaaattcaaagaaaaaacaagaccacgctacagatttactatctccaaggagtccaaacttattattaccaacgtggagtttgagtggcaaaatgatgttcgagaatattatcgaagccacacaatatgttgacgacaaatatcttatt

SEQ ID NO: 303416 - DNA, 423 bp, Glycine max
tatcataatcgattacatagttgtttttgtgacaattattgatttatttaggagtctctgttttaattgattaccatgtcatataatcgattacttttctttttataagtgtttcagaagtaaacaagaacactttaatcgatttctttgagtatctaatcgattacattgttcttgagttgtttctagttttttggaagaacactacaattgattgaaagataatataatcaattacttcattgaattaattaattaccttgtagatttaattgattacaggcggttataactgttttctctataaataaccacattgtgttctctctaataacataacattttgagcttctgaaagagctatgatcacgtgttgttattagttaaagaaagaagagaagaaaagtgcttagtcataacttc

SEQ ID NO: 303417 - DNA, 433 bp, Glycine max
  unsure (1)..(433): unsure at all n locations
agtttgtataaaattgaaacgacaaaaatttttatctaagatttccgaataaattccgtagtatatcgagacgctcgaaattcaaaataaacctctcagcaaaatgaaacgacaataactttttactcgaatgtccgaatgaatcccgtaatatatcgagacgctcgtaactgaaaacagaagctctgagcaaattcaaaagataataactttttactcgtacgtccgattgtttcctgtagtatatcgagaccctcgtaattgaaaccagaagcccgtagcaaactcaaacggcaataaatttttactcggatgcccgaatgaatcccataatatatcgaggcgatcgtaattganaacagaagctatgagcaaattcaaacgacaataactntntactcggatgtccgaatgaataccatntaaatcggat

SEQ ID NO: 303418 - DNA, 429 bp, Glycine max
tctggtatcaattacgagcgtctcgatatactactgttacataatcggacatccgagtaaaaagttattatcgtttgattaggctaagagcttgtgttttgaatttcgagcgtcttgatatattacaggactcaatcagaaatccgatttaaatggtattcattcggacatccgagtaaaaagttattgtcgtttgaatttgctcatagcttctgttttcaattacgatcgcctcgatatattatgggattcattcgggcatccgagtaaaaatttattgccgtttgagtttgctacgggcttctggtttcaattacgagggtctcgatatactacaggaaacaatcggacgtacgagtaacaagttattatcttttgaagttgctcagagcttctgttctcagttacgagcgtctcgatatattacgg

SEQ ID NO: 303419 - DNA, 379 bp, Glycine max
agcttattattttgtcggctgctgatctgcatattagctacccagtaacaccctattttttgtaaaataaataaggatgcatagttctattaattaaaataatggtcttaatgtaaataaaataaatatgtttttacaaaataaaaaagatgtcttgtttatttatttcaatacggagtaaaataaagctctctttcaaaattgctctcccttcttcatctccaaaaactctctctttctaccgcatacacgcaaatctatcgcaataaaactatgatcctagacttgccaaccattgaatcatcctgaaatatggacaccaccttcataactcattattgcacattcctattgttgcgatttgccaaataatgtctgt

SEQ ID NO: 303420 - DNA, 430 bp, Glycine max
  unsure (1)..(430): unsure at all n locations
tgtaattngtactagatgagaaattgtgttttccttcttaaagatgatgaaactcacaaaccaagaggggggtgggggtgaattggtttctaaatcataatagacttttaaaaaccagaggaaacaaaacttcttttccaaggatcgtatcacaaaattttgataaaccaatatttaatcaatcaccctttacacaaaatcctttgttaaagtttgtcataccctaatttcgtccggggacctttgcttgatgacatgcgacctttctttggtccttgtgaggtgcttggtacccatcattacgcaatttgtgaaattccaggacatgccgaaaaacacaaataaatattgatgcacaatccgtatgtatccgtgacacaccggaaatcaaatggaagcatcgttgcatcattaagtgagggttcataac

SEQ ID NO: 303421 - DNA, 430 bp, Glycine max
tcaagtttggagaggatgcttcaatggaggcaaaaaaagagggagagaaagaaagaggggggagcatgaaattgaaggaagaaaaagggagagaagttgaactttgagttgtgtctcacaagactctcattcatcaaagttacaacaagtgttacacatgtttctatttatagactaggtagcttccttgagaagatttcttgagaaaacttccttgagaagcttctttgagaaaacttacttgagaagctagagcttagctacacacacccctctaataactaagttcacctccttgagaagcttccttgaaaagattcctaaataagctagagcttagctacacacacctctctaatagctaagctcacctccttgagatgagaagctagaacttagttgcacaccccctataatagctaagctcacc

SEQ ID NO: 303422 - DNA, 418 bp, Glycine max
  unsure (1)..(418): unsure at all n locations
tctnccctattctgctataaatatgggaatatgtgattaagaaaagggttcagccccttaggcacttctttctctttcgaatttgctaaggaaaattatttccgtgaagataatccaagccgaggcgcttccgtaacgtttccgtgagtaactacgcgaagattctcgaccgttcttcaaagattcatcgttcgttcttcgttttcttcagtcttcaacgggtaagtacctcaaaccaagcttttcaattcactctatgtacccgtggtggtccacattttgtttcatgtatttttattctcgttttcatttactttttatacccccttttgacgtgcttaagccatttacttaagtcatttctcgcttaatctaaaaataacataaatttccaccgatcgtttgaattgtatcatcc

SEQ ID NO: 303423 - DNA, 454 bp, Glycine max
  unsure (1)..(454): unsure at all n locations
ggcgaaancagctcggacccgggatactctgagncaccttttgcattttgctagtgcagcgcgagggcccaacagcgtcaacaaggtgttccccaccacgcttcttagcaactccaaacaagagtccaaaaagatgaggaagttgctccctcagttccttaagcccgacgctctccaacgctacgttggaatcatggacaccattgctcgaaaccacttcgcttacctttgggacaacaagacggaactcaccgtctatcccttggccaagaggtcctaaatacattcaccatcttcttctttaaatgattcccatgctactctctataatcaaaatattttccttttcttcatgttaatcaccatggttctcactttcagtagcatcgtgcaacccataaatgaatattactaaatttccttttcacacattaatcccactatgcatcggcat

SEQ ID NO: 303424 - DNA, 416 bp, Glycine max
  unsure (1)..(416): unsure at all n locations
taatcataggaaacaaaatcaatccattgtgtaagttacgtgtagaggcttgctttttatgcttctctgttgtttgtttgcgaatttttataaatnttctaaacatctaatattttgttaattcaattcaagtagatattaaagtaactatcattccaaacaacaaagttttggctaaaggataatgtacccttggcgcacgcagttcaattaaatcctattaaaatatctttatggaaatttaattgttgaatagacatttttgtaaattcattacagcaaatatttttattttttaataaaggttggtgcaatgtcaagattggagtacacgcaaaattacttgtgagaaaagataatcggaaaaatcatagcaatagccaataagaagataagcaacgtcagtacatcagctc

SEQ ID NO: 303425 - DNA, 438 bp, Glycine max
  unsure (1)..(438): unsure at all n locations
agtttgtcattgaattattngattncaggccagggataatttccattaacttggaccttaagaggggtgcaagtggcaggttcttgaagactgctgcttatggccactttggaagagatgacccagacttcacatgggaggtggtcaagcctctaaagtgggaataatgccatgaataaagctgattgccaagaaactatgtttgatcttatatgctttcatacctaagatccgtgatatgattttgccttagcttttgtatctttataaataaataaaacatatatatgtcgagttgagtatatgaacatacaaaggaagctgcatagcagcatcaatgtactattggaagttaatgtttgagatatatccgttacgatcgctatccattatccattatgtttcctctcaattgctgagagtcttagagaatcttga

SEQ ID NO: 303426 - DNA, 432 bp, Glycine max
tgtagtttaaatttgttttgagttacatatatggtttttgtgatttgttgtcaactcttatttctctttatggtttccatttcactttgaattttattattcattcctcatgtaatttattaggtacactaataataaatggacttgcatagggaaggtgattttccaacttagattctacagttgcattctttatcttcacttcatcaccaattacaagcaaacataattataacttgtatgtatatcatcagttcatcaccaatttgtatctatatccttacgcaagtttctgttttcttttgataagttcaagtcactatcatcaaatcagttaaatggaagcattccagatgccttatcattgttaactcaattgtcagacttgtgagtttatagcattgcctcatctcaatactaagttgttatatt

SEQ ID NO: 303427 - DNA, 438 bp, Glycine max
  unsure (1)..(438): unsure at all n locations
agtcttcttttgccattcctgcgaaggcaaacatttggaaagttagttttaccagtgggacgttactctttaaagcaaaaatggcatataacctcctcccataaattcaaacatcaatgtaaatttagagtaagcttatgcgcatacttccttacaaatgttctcttgcacacgacattctattaaccgaaaaatgcacccatatacaatcaaggcagcttcgttacctagattatttatacgtacctccaaggtgtatttgttacttacatcacacacatctccttggctaaactcacatacatgcatactcaagcattttggggcaccaaaaattgcacatgtgcacatcttggcatttctaatacctacatacgcaaacttcatgatgaatctngactatctacacaataaggtgctacatttcatgctcttttc

SEQ ID NO: 303428 - DNA, 433 bp, Glycine max
  unsure (1)..(433): unsure at all n locations
ntgaggatttggtctttgccagtgaaaggatcgatgtgggtcttttaaaaggaaaatttagtcatcctgcttggacgaatgagaaaactggggcaaatgaagagggtgagaaagagggagaaacccatgctgtgactgccattcctatacggccaagtttcccaccaacccaacaatgtcattactcagccaataacaaacctcctccttacccaccgcccagttatccacaaaggccatccctaaatcaaccacaaagcctgtctaccgcacttccaatgacgaagaccacctttagcacaaaccaaaaaacaccaacaaaaaggaattttgcagcaaaaagcctgtagggttcaccccaaattccgttgtcatatgctcgaacgcaacgtgtgcttataatggaggagccccggtgcattccattgagcat

SEQ ID NO: 303429 - DNA, 439 bp, Glycine max
  unsure (1)..(439): unsure at all n locations
gttatcattctntctacaaannccttcacagataactaccataaggcataaacctagtagaactacccatcatatctcccaaagacccaatacccacgaatttcatgtgagaagaagtccacccatacctgaaattcgaagtcccacaacgtagaggtgcgcttcacgacttcgaaaatggcttccttttgcaatttggagtagaagtgatgagcaaagtttggagctttaatgggcaacaatggtggaggagaaagggagaagaaaagcaacgtgggagatgaggaaaaagcttctgaaaatctgctgagcgaagtgagagagtgtggctntttaaaaaaaaaactttctttttcctattgttttatttcttaacagcacttgccacttgtcccattgtgagtggaacaaanaggggcccacttttctctcgatgtga

SEQ ID NO: 303430 - DNA, 363 bp, Glycine max
gggagggcgacgcgagactcacgggtgcgtcttccaagaaaggaaaatgcatggagtcgccaccaacgtttatttggggaaaacatccgaaaaaccgaaaaagacgtggtctacaaactttaagtgtgaggctcgagagttgtatttacgcacggggaaggtattatcacctgttagacaagtggcctcagatatcttaagaagggggggttgaattaagatattccaaactgtttcccctaattaaaaatctattttattttttactcaagttataaattcccttaatgacaatcttcttaaatattaattcaaatgaagcaacttgaatatgattatatagcaataatatatataggagat

SEQ ID NO: 303431 - DNA, 335 bp, Glycine max
  unsure (1)..(335): unsure at all n locations
agtttctgnttttgatttatanngggcnaaagaagctattgaattttgttcccagcacatcgaaacagctcaagttgttgggcttcctgaaactcgtgatgaccggacatggggaggtaagggtacacgaagatacaatgttgtaacaatgattcgacaaaatgtcttacaagtgcattggtatatctcgaataacacataagaggttcttccttacatacacactcacaaaaagtatctgacagctattcacccacaaatgaacatgatgaaagtgttgcacgagcataatagaactttcatacatcggttaaagacataatcttctctgatga

SEQ ID NO: 303432 - DNA, 434 bp, Glycine max
tgttgataaattccaacctatcgtaatcttggggttttcaatttttcatatttgaagctacatatacactactatatcgatcagaaagtatgagcatatatgtatgcgtattcaacccagataatatttaaaaaggaaatcaaaatacagaacaaggaaacgaatggatagagtataatcatggtgagactttgacgtggtgtgattttaaggagtctagattatggaattattaacacaagattcttagcatgcagttatatttgaggattacttgtcatcatggatagaatgtgattggataatcatagaagacttatattttttatccatttaataccgatagctgacgctgtctatcttaaactcttaatacaatcacggatatataaataaacaaatacgtacacttatagtatatattggccaacaca

SEQ ID NO: 303433 - DNA, 419 bp, Glycine max
  unsure (1)..(419): unsure at all n locations
agttttgcagattnggncttcgccagtgaaaggatcgatgtgggtctgaaaaaaaagcaaatttgatcatcctactaggacgactgagaaaactggggcaaatgaagagggtgagaaagagggagaaacccatgctgtgactgccattcctatacggccaagtttcccaccaacccaacaatgtcattactcagccaataacaaacctcctccttacccaccacccagttatccacaaaggccatccctaaatctaccacaaagtctgtctaccgcacttcccatgacgaacaccacctttagcacaaaccanaaacatcaaccaagaagtgaatcttgcagcgagaaagcctgtataattcaccccaattccagtgtcctatgccaaacttgatcccatatctacatgataattcaat

SEQ ID NO: 303434 - DNA, 430 bp, Glycine max
tgacactatgaaactcagctagcatacaaattatcccttaactgggcttaggtacttgattgagacttgggttcctaggaaaaaaagctataatatttcaacttggtcttagcctttatgcaatgggaataggttgaagttctaggcataaacaaattcagtttgatcaccatggacttgtttagtctagacaataagaacttcttcaaatagtggaggttgagttgcttaattttgttttataggtagcactcattttgttagtttagatatgacatgtttagtcttaaaggttgtagaacttcttctcctattaaaggaaagaatggtctgatcatcatttttttctagtggaccaacattagtttgtgtaaccacttgatcttccttcataataatttatttaaacttaatctttaatgatctcttt

SEQ ID NO: 303435 - DNA, 436 bp, Glycine max
agtttgcttttgatcatgggtcagacgaataaggggctgaagatcaactcgtagtggctcacgacctaactcctatagtggtgaaagaaacctctgtctcacactatcacaggaaaacggttgacatttcaccacaagacgagaatttggaattgcacatagtatctttgcccagacctgcagtaccttgggtcgtaatctgaataaataaaacaacatgaatcacgggatacacgacttacctcttacaattaggtattcataatctaaaatacaagtacgtgatatatttaacaatattactacccttggcaagattgttggaactaccaattgcaacgaagccattggtaagagcatgagctggacaaactcgaccagcctcacgggattgagtgtaaccaaggaagcattccggttatcgaactatctcttc

SEQ ID NO: 303436 - DNA, 427 bp, Glycine max
tcaggcaattatctaattcgtcatgaataatactatctcataagcttacactttctatgtagagacatgtgaatggttttctattatatccctaacataactaacaaattaactaaaggctgtagcaaatgatttcattaatataagagacagcctcccttacctaccaacccaataattgcttttaccactttccaaaagattaaataaaaatgaaagcattaccaagatacagggaacattgacatggtttaatactgtttatgttgcaagtgttagacagcttatggttccatatttgtaggggcagatgtgtctttgaataagtctatcacattattaggaaatagtgggtcatatatgcgtaatatacgtgagcagttctcttttgttttcaagtccacaactctgatgtaacgctatatat

SEQ ID NO: 303437 - DNA, 406 bp, Glycine max
  unsure (1)..(406): unsure at all n locations
ctttcaagttgctctacannacancgatgcncatattcatgggaggagggcgcatgccattcttgttttaagagtagtgtcccactggtaaaactaactttccaaatgtctgccttcgcaggaaatggccccgaggaagcttgcctcacagaggtccaggagggacaaggcagccgaaggaactagttccgctccggagtatgacagtcaccgctctatgagcgctgtacaccagcagcgcttctaggccatcaagggatggtcgtttctccgggagcgacgcgtccagctcacggacgacgagtatactgatttccaggaggaaatatggcgccagcagtgggcatcactggttactcccatggccaagcttgatccagaaatacgtcttgagtcttatgccaat

SEQ ID NO: 303438 - DNA, 276 bp, Glycine max
gacataagaaactcacgctgagagagaagagacaagcggaactttctgcttttattcgttgaccacagagtggtacctggagatatgtcgcgggggtcaggagaccttggggacgacaggcggggtgctactgcccaaaaccaagcttgaccaatcccgacccaacccgggcatagccggtcagtgagaacctgtgatgtacctaaacaggcgagctcctggcagtcaacagataaaaggaacagagaccacaaagcaaggacgcttgcggaggct

SEQ ID NO: 303439 - DNA, 427 bp, Glycine max
  unsure (1)..(427): unsure at all n locations
agcttttggagtagaaacctgcgaccaactgattctatttcagaaaggaagtcatatctagtcaaggtctgagagaccatacaagtttcctaacgatttctaattatgtgggccattaagtctatcatatgctgacaatagccgagaagcccgtgaatctcttcgggggtggagtaggtgtctgccatcgccttggccttggctaacaatcggagaagttcttgactcccgttcaaggtaagagcaaaccgctccatccacatggntgcctcttggtgtaaagagtcgatcacacttcctctagcctctttttccgcatatacttgagcatactcatccgcgattctatgctcgtgggccgtggctagacctaactcttcttcgtacttggcgatgatagctaacatgttggtctctgtctcgcata

SEQ ID NO: 303440 - DNA, 367 bp, Glycine max
ttataaagcttattatatgctcaacgttgtctctagaacatttccactggatttaatgatgaaatctatgcattttcaggtgaaaagaggctaagtcttgaatcgcaaaatgtagcagttgggctaagctcagcatttgggctaagcgcatatccaccgctaagcgcagctgcagcgcgcttagcgcaaaggagaatctggcagagcatcaacatcaaagccacgcgctaagcgcacgatcagtgcgctaagcgcagcatgtgccttcagcaaggctaagctcgagactggcgctgagctcgatatcacttactctcgctaagcgctagggtggcgctaagcacaacatcgcgattgtagagcctat

SEQ ID NO: 303441 - DNA, 411 bp, Glycine max
  unsure (1)..(411): unsure at all n locations
tttcaagtttgctaacccatggaagctcctaatatctcccacactttttggggtgggccattcttggatggccttgattttctcaggatccacttggaccccatttctaccaactacaaaacctaagaaaactatattatctacacaaaaggtacacttctctatatttgcatagagggtgtttttcctaaggactgaaagaacttgtctgagatgtcctaagtgatcatctaggctcctactatacactaaaatatcatcaaaataaacaactacaaatctacctatgaaatcccttaagacatgattcataagcctcataaaggtgcttggtgcattagtgagcccannaggcatcactagccattcatacaaaccaaacttggtcttgaaagcagttntccactcatc

SEQ ID NO: 303442 - DNA, 424 bp, Glycine max
tcaagttttagaaggtgtctgccctttgataagcccttcacttggaagaagtttgaaattggtagggggaagactgactctatcttgtttaggtcactagctgacctgatttctaccatcaggtgtttacgtagttcatctgtaccatttccttcaacgtggcaacttataattgtcatttccggctcctcaaaaactataaaatccaatcccttgatatcctcagttccaacctgtgaacatcaacccaagcttacaacagagcagaacattgacagcaaatctaaagcagatagctaccgggaactaaccttgacagcaatagaatctggagatgcacgctctatattagaactgcccacgtcccttttagccactttaacaacatagtcagtatcaggcagtagtcctctcagacgataat

SEQ ID NO: 303443 - DNA, 291 bp, Glycine max
cttgaatgagtttttttgggtatgagccgctatagtttataatctgcattatacgtcgagtaaatacttttcctcttgtctttatatgtgagttttatctttttcactctttacatttgattcatatttttaaattgaatgtcaatttttttcaaaaaatataccaataataaaaaataatcttgtatcaagatataaatgtttatgtaaatctaaaattaaaatatttatttactgtatattaaaattaaaatatatttatttgttgaattctttttatcaacctgtcta

SEQ ID NO: 303444 - DNA, 416 bp, Glycine max
  unsure (1)..(416): unsure at all n locations
tcacccctgcccctttntatgttttctggtccaatgttgctcgcctaggctagctaacatgatcatttttttttggcaaaaatttaaatgcccccttgtcatgcttgtgtatttccttaattccaaggattgcaaataaactaggcatattcgaatgtaacttaagaaaatagatgaaaaataagaagcagaaattttaaaggtactaggctgcctcctagtagcgcttctttaacgtcttgagccggacctgngatgatgatctattgatcgcgggcccagcacctactcgtacctgcccctaagcttttgaatacaagaaatgacaacatgcagtanatgcaaaacaacatcacaaaaccgatattacctttcgcttaccttttatctagaatttggtgtggtattgaccatcg

SEQ ID NO: 303445 - DNA, 435 bp, Glycine max
  unsure (1)..(435): unsure at all n locations
agcttgaagtgaggttgtgtggaagggtgagacttcctacttttattcgttgaccacagagtggtacctagagatatgtcgcaggggtcatgagaccttggggatgtcgggtggggtgctattgcccaaaaccaagcttgaccaatcccgacccaacccgggcatagtcagtcagtgagaacctgtgatgtacctaaacaggcgagctcctggcagtcaaccgataaaagaacaaagaccacaaagcaaggaggcttgtgtggtggctggccagctatggatcttgagtaatatgtggaatatagcctctggtaatcgattaccaagggtgggtaatcgattacaaggcttanaaatgaagacaggaagttaagatggtctctggtaatcgattaccaagggtgtgtaatcaattactacgcctaaaaatgggat

SEQ ID NO: 303446 - DNA, 432 bp, Glycine max
  unsure (1)..(432): unsure at all n locations
tcctattcatcgaagcagcataatcaaacttgcctcttcttatgcctacctcaatcctctcgcctacaaacactaaatctgcaaagcttgatggcatgtaacccaccatcgtctcatagtaaaacactggtaatgtgtccactatcattgttatcatctccttctccattattgggggcactacttgagctaccagatccctccacctttgggtgtattctttgaaagattcatgctccctcttacacatgttttgtagctacattttatccggagccatattagaattgtactgatactgcccattgaaggcaaccattaggtcctttcaggaacggacccggaaaggttccatattagtataccaggtgacagctgtcccagtaagactttcctggaagaatgcataaacaatntttcgtctttcatgta

SEQ ID NO: 303447 - DNA, 403 bp, Glycine max
agcttgaagctccaggaaaagcttgaagaagttttgaagatgttttggcttttacatgcctaactcccttgagtggcatttgtattggttgttatcttggttgtttcatcttagtacattttgatatttgtattgcatcatgcatcatcgtggtttatgtgaagaaaagcttctaagttagaaagtttattcagaggaaataactctctattttaatcggttacatcctcatcgcaatccattacaacaagttgtctaaagcttaaagagttgagtctcatattagtttaatcgattatagtagtcttttaatcgattacactgttgtttgagatagtgactgatttattcaggagtctctgctttaatcgattgccttgagcagagtacttattagacctat

SEQ ID NO: 303448 - DNA, 433 bp, Glycine max
  unsure (1)..(433): unsure at all n locations
ntcatatcacttggatgcttcattgcttcaaataagtcgaatgatactttctgatcctccacacccaattctaacttgcctttccccatatctactatatagttggccatgaaatttgtagggtcctcctctatatccataaccacgaaatctgcaggaaatacaagctgcttgacttgaataaacacatcctcaatcactccatacggtctagtaatggagcgatcagccaactggagggttatacatgtgggcattatctctatctctccaagtcgccagcacatggatagaggcattaaattgatactagctcccaagtctatgagagctntacctacaacaacctcaccaatagaacacggtatagtgacacttccgggatcattatgcttcggnggaaggatgcgttgaatgactgtactacagttac

SEQ ID NO: 303449 - DNA, 413 bp, Glycine max
  unsure (1)..(413): unsure at all n locations
agctttatccttagatccctcttgttgtactagactcagcttaaatagctttcgaaagtttagactaatttagcctaagctttgtcctcagatccgtcttgttggactagacttagaccaaacagcattattgtaatagcatatttaaaaccaaaacttaatccgcagatccctcatttaagactcagtttcaattctgcttcattcaagttctaaggcaatagtacatttcccaatgctaaagccacctaacagaaggttcaggctaggatataagcctacatatgccaacgtgaggggaagtgcccaagaaaggaggggtagaagcatgggccagccacaaggaccgcaagtgaaggggattcccttatgtcacatcaacanaagctttgtcagcacaagttggatgtgtg

SEQ ID NO: 303450 - DNA, 429 bp, Glycine max
  unsure (1)..(429): unsure at all n locations
tgacgtaacactntgagcatgaaagtatgtnnncttttttnattatgcatataggngnatggcaattagaatatattagatgttcttgtatgttaacatgggtaataggatactttctacacattcgcgttaatataagcattatcttgtaaactaacttctaaatgtttgttctcgcaggaaatggccccgaggaaacttgcctcaaagagatccaggaaggataaagcggccgaaggaaccagttccgctcccgagtatgacagtcaccgctttaggagcgctgaacaccagcagcgcttcgaggccatcaagggatggtcatttctccgggagtgacgcgtccagctcagggacgacgagtataccgatttccaggaggagatagttcgtcggcggtgggcatcactggtcacccccatggccatg

SEQ ID NO: 303451 - DNA, 438 bp, Glycine max
  unsure (1)..(438): unsure at all n locations
agcttgaatttggtttagacatgattgatacatgatttgggacttgtaggatttgatttgggcaagattggatgagggaaagtgtgattttcgaaatctgcacttatgcagaattttgctgtcaaataggtacagcagaattttggctttgtgcaaaaaaatgctatgcatttgctggttgtggaaagagtagtgtagaatgagttctggatgtttgctagtagatcccaacggtcaaaatgtaggcttatgtactagagacttccagtaaaattttcgagtcgatccaacggttaacgaactggaatgaaggaattgttactggggtctttaagtgagaaaagctgtgattctggttggtgttntgggcagagttttctgcctttgccctatnttcttggctgtgatagttagtgctggttgaatattgtcttacct

SEQ ID NO: 303452 - DNA, 438 bp, Glycine max
  unsure (1)..(438): unsure at all n locations
tagaaactcaagcttcattctacaccttataaagaggatgagatagctgctcaatagatataagcttcgngatcatgagggagctaacaaaaattttcatccaggtggaccttcttctagtaattctgacttgcagcagcctcctatccatcttctatttccacctagagcaattccaaacaaaaaagatggaagaagtggataaggagatcttggagaccttcaggaaagtagaggtgaacatacctctgctagatgacatcaagcaaattccaagatatgccaagtttctaaaggagctgtgcacccacaaaaggaagctcataggcaatggaaggattagcatgggcagaaatgtgtcaacatggataggtaaatctgttcctcacattcctgagaaatgtaaggacccaggtactttctgtataccttgcatta

SEQ ID NO: 303453 - DNA, 434 bp, Glycine max
  unsure (1)..(434): unsure at all n locations
agcttatgtgaattcgtagttttataagcaaagagtaaaaatttatcataataaaaagctttcaaaaagaattttcagcctagccaacaggtattgttatttaattccaaattaagattgttttcaggtaagctaaaatccaagtggtctggaacattcagcatcaaagaagttatgctacatggagcaatgataattggaggatccagccaccaaaagaacatgcatcgtgaatggcagtagaatcaaaccctacttangtcgtgatttcaagaggttgaccactgttgtccaactacaagaggctngaaccacaacaaggatgtccagcttanacgatgttaaataagcgctcttgggaggcaatctagtatttttcaactcttcttttaatattnnntttctgattacgtaattgtgttgtgtaatatcta

SEQ ID NO: 303454 - DNA, 399 bp, Glycine max
  unsure (1)..(399): unsure at all n locations
tgactaggcgagttgattntagcctcagtttcaccttatttattagtcatttctgttaagaatgagaaatcccatagagaaaatgtccggttgattttccgctctattttactaaaaggtatatttttgttattatattattctttacctctctcttagagatgcaaaattgtgtaacaaattacttctttcaatttgatatgacaatttagttcatctaagttacgagagcatgcataacaaaatttttactgtcaaatacatccaacaatgtcatgcaattttggtcattntttacaaattgaaaaaatagatgttgggataaatttatctcactttttacaaagagataaaattttatttttttctaatttaggaactcaaatggcagcgcattac

SEQ ID NO: 303455 - DNA, 412 bp, Glycine max
agttttatgaaaatcatgtcttttccccaatttatggttctttttttaaatttgtacatatttttaggtttagtttaattttgcttagtagaattacccattattgtgaattaatgtgttttcgacttcagtttcaggtaaaaggatgaagaagataaaggtcagtagctggtgtctcgctaagtgaggcttatgcacttagcgagaatcatccgctaagcgagacactcagcctgcttagcgagttgggaaaaacttctatggattttctaatttttgaattgggctgagcaagtcttcccgctaagcgcgtggatttgaattctaaaaactcaaaagtcattgagtgctcgcttagcaagtgaccggcgcttagcgaggcagtcgaaactgccaaaaataaagcttaact

SEQ ID NO: 303456 - DNA, 422 bp, Glycine max
ttaggaggaagcaggacatggacgtcagtttaccgtttagcttctgcacttcctaaacattggtaggattgtgaatcactagtatgtttgtgcatttgtcggggttggcttctattccctgatgtctaatcatgaaccccaagaactttccaccgcctaccccaaaagtgcatttttccaggttgaggcgcatgacgtacttatggatttctctgaacacctcttctaagtatgccacgtgttaggctatgctttgagacttgacaatcatgtcctcaacctagaccttgagattttttctgatatgttgtttgaagatccggtctatcagtctttagtatggggtgcctacatttttcaggccaaagggcatgaccctatagcagaagttagcatccacaggtatgaatgtcattttctct

SEQ ID NO: 303457 - DNA, 363 bp, Glycine max
  unsure (1)..(363): unsure at all n locations
gctcgggacccgtggaagctctccagtcggcctgcaagcttgcaagtttcttgagaagcctgccgtgagaagctagagcttaggtacacaccctgccctcctacctaggctgagcttcgtgagaggctgccttaatgaggagtcctatagaagctcgagctgatctacgcacacctctatgcttgctaagcgcacctgcgtgagatgacaagctagagcttagcgtcacacccactataatagctaagctcacccccatgacacattgcatgagaatacaattaattccctactactaagactactcgagatgcctctcattacagggcatacaccctatactactagantggccaatacact

SEQ ID NO: 303458 - DNA, 359 bp, Glycine max
tctccttcttttccctataaataggggattgagggattaacatttatgcccaaccctcctggtatttgagaatcactaaaaattagtgagaaaaattgttttcgtgaagaaaacccaagcctaggcgctttcgtaacgctttcgtgacgtttacgtgggtgatttcgcgatgatattcaaccgttcttcgtcattctttattcgttcttcgtcgttcttcggtcttcaatcggaagagttccgaaatcgaacttttcaattcattctatgtacccttagtgtgccccacttgttacgcgtgcttttattttcatttcattgacttttcgtacccgcttttgatgtgctctagtcattta

SEQ ID NO: 303459 - DNA, 416 bp, Glycine max
agcttggaacacgcgccgagggcgcaaattaaggccaccccatcgagggggagggcgcgctggcgcatttggaggtagaaacggagggcatcaagggggtgggagcagcggatgagggcggtgtagtcgacggagtccttgtgcgagtgggggattcggtcaaacagtttgcgggcgtgggaagggagggggcaggaggcgtagaggtggaggagggcgttaaggaggaagctggagggggagaagaggaggccggagacggtggccgcggcgtggagttgctcgccggggcggacggcggaggcgcgggcgcattgtcggagaagagaacggaatatgagagcacactgctgttgtgtggtgtgtgaccatctcataccataatatgatatgattatttgagttacgataaatag

SEQ ID NO: 303460 - DNA, 427 bp, Glycine max
  unsure (1)..(427): unsure at all n locations
ntaacataaagaacaaaagactggcctctgcacgaatattatacattgagcaaacaacactgatctcaaatcggtgataaaattctaattaatcgcaattggaagcttcataacatttaatttggataagattttatatgtaattattatttactttgtcaaataacaaacttaatgtaacaatcttatcattagatagtcattgagaagtgaatagaatgaaatgcatcttatttggttatttaatttcacctttttcaataactaaaatatgtataatgttttctaactcccgttctatctttaaaatgtatcctactcgaactagttccctgggcatttattatatgggtatttacaagtttaaataaattttaaaaataagaattatatgaaaatatcattattgttcaataataaatatcat

SEQ ID NO: 303461 - DNA, 434 bp, Glycine max
  unsure (1)..(434): unsure at all n locations
agttttggtctctttctttntgtcatgcacatagagagagtagcaatgcaaaacaaggttctatgttagggttagtttgagaatttaggatgtttgtccttaaatgctttttccttttggtgacagatgtagtaggagcttccattgttagagtgtagttgttgaagaaagataacagcctgtgagaatcaatctgtgcgttattttaggagtgcatgtttgatcaatattattttaggatcatatatatttcatgttttctagtataaatatctacaattattcttgtactaagggagacatcttttgtttcctaaaacatgtgctangaactttgtatatatttcccgttgatctgatcaatgaattatccattcaaaccataatagttattgctcttatttttntgagtgataaaaaatacacagagaatg

SEQ ID NO: 303462 - DNA, 429 bp, Glycine max
ataggtaccaataccatatactattttgtgacaaaattaaagatattaaaccatgtccttcaaaatcagccatctgggtacttcacccaccaagtaatgtggcactttatctagctagtctcggttctcgatgcttccaagagcccttttgagttttccctaccaaatttctctcaccagtcactaacataacacaaaatttctgattcaggtctcttccgcgtatgcgccaccacatcatcacaatgtcccacttacatattcgcacatttatattattctacccgtactttagtacttaccatcttcatttcataccttatatatatatatatacaactctcatcacacactataaataccctctcattcttcttatcattccacgcacttagcaatcaatcaacacttccaattacaatatacaca

SEQ ID NO: 303463 - DNA, 375 bp, Glycine max
  unsure (1)..(375): unsure at all n locations
agcttgaatgtgtgtaccccaccatttttcatagnaaaacactggtattgtgtctactattattgcgatcatctctttctccgtcaatgtaggtgccacttgagttgccaagtctatccatctttgggcatattctatgaaagatccgtgccccctttttgcacatgttctgtagttgcatcctatccggagccatatcanaattgtactgacactgcctaatgacggcgaccattatgtccttccaagaatggaatcacgaacgttcctaagttactataccaggtgacagttgtcccaataagactttcttggatgacatgtatcactagtctctcatcttttgcgattgcacacatcttttgacaacacatc

SEQ ID NO: 303464 - DNA, 394 bp, Glycine max
tggcgtcataccctaatttcgacagggtcttttgtttgtgacatgcgacctttctttggtccttgtgaggtgcttggcatccatcattagccaatttgtgaaattccaggacatgccgaataaccaataaaatattgatgcacaatccgtaagtttccgtgactcaccggaaataaaatggaagcatcggagcataattaaatgaggttccgtaacattccgtaagtcaaaagggggatgattatgtaatccgcaaggtttcgtaacattacggaaagaaaacaagtatcgtcacgaaattctaagtttccgtaactttacgagaacagaatcacctcataacagcagagggggtgcacttattaaaaatgggggtgcaaatagcacccaggcc

SEQ ID NO: 303465 - DNA, 390 bp, Glycine max
agtctttggaaaatattctttggccagagcatcatcaattcacaaattctttctaagattgtaggaactaagttcattaattatattgaatttctggattgacttggatcaaacgtgagaagcgcttagaagctcagccaaagcctcagccaaaaacactgtcgcttggaagctcggatatgacgctgacaccaaaacaactcaatcaagggatcaccaagagaacacaggcagtgcaaaaccatcaacaatctcttcagcaacctctgcaatagctgataaagccatataagccaaaaacacagtctcttccaagctcggatacgctgacaacaacactgaaactactcaagcaagccatcaagagaacacacaaccatcaacaatctc

SEQ ID NO: 303466 - DNA, 396 bp, Glycine max
tcgaagtgacagtgctttcggctgaggtttctgatgtgattgttaacggttttcattgcttgagttctcttcttgatgctttgttcgagttgattcggtggtgtcatcactgtatccgagctttgaagctacaacatttttggcagtgatggctttgtcagctattgctgtggttgctgaggagattttatctgtgtaactgctctcgtttgatggttcttagtgtggctcctcaacttgtgtggtggtgtaggtttgcggggtattggttcgagttggatattctggtacaaattgatcatgacttccagctgaagcacaaagagtatgtgttgaatctgttctaaattgttgcggcaagtgtcggtcatggatccttgatgaagtgtgctgaat

SEQ ID NO: 303467 - DNA, 433 bp, Glycine max
tctgcttatgctgcaaatatttacaatagacctactcaacctcagcagcacaatgaaccacagtagagcaattatgacctttccagcaacagagacaaccctggatggaggaatcaccctaacctcagatggtctagccctcatgaacaacaacaacagcctgctccttacttccaaaatgctgctggcccaagcagaccatacattcctccaccaatccaacaacagcaacaaccccagaaacagccaatagttgaggcccttccacaaccttccctcgaagaacttgtgaggcgaatgactatgcagaacatgcagcttcagcaagagaccatagcctccattcacagcttaaccaatcagatgggacaattggctacccaattgaatcaacgacagtcccagaattctgactagctgccttctcaagctg

SEQ ID NO: 303468 - DNA, 419 bp, Glycine max
tgtcttcaacaaacaaatcaaaatcaattttctgattttcaaaacctagctccagcttccttttccccatatcaactatgcagcttgcggtcaacatgaatttccttcccaatattatagggatgtcaatatcttcagagacatccattaccataaagtctaccgggaagataaaatattttactctgaccaaaacatcttcaattactccatatgacctggtaatggagcggtcaactaattgtaaagtcattcaagtggggcatttccaactctcccaatcttctgcacatggagagtggcatcaaattgatactggctcccaggtcaataagagcttttcctacattgacttctccaattgaacaaggaatcgttacactcccaggatctttatgcttgggtggaaggatcttcta

SEQ ID NO: 303469 - DNA, 440 bp, Glycine max
  unsure (1)..(440): unsure at all n locations
agtctttgtttcctgcgataagtttgcaaagctatgaagattcaaccatgcttaattatgatggttatttttgttacatctgtactttaggaatagtaaaaacacatggtgatttgtgattgaaatttatcaactaaaatatgctagtaaataatacattcttgctttgatttttagcagagatccacatatgatgaatctttgaatatttgcagtgaactaaatgatactgttattgaggcacaactaaggacaagacaagttccacctcggcttccaaccaagactgcaattgaaagttatcagcagtcaactaatcgactgctcattntggtatgctgtctcacaatgaagctcgagacttctctgaatacatctttctgtttccttgtcttttactccttatctgagttctttctacaggatactgcttcatttct

SEQ ID NO: 303470 - DNA, 430 bp, Glycine max
tatcgtaatttattacacaattatttttgaggcaatgattgattctttcatgagtctctactattatcaattacgaggtgatatgatcgattacttctcttttaaaagtgtttcagaagtgattaagaacactttaattgattacatcaagaatctaatcgatttcattgttcttgatagctttgcagtttttgggaagaatactttattcaattgaaatgataatataattgatcacattgtatatttaattgattaaagatggttataactgttttctctataaatagccaccttgtgttctcacttctaataagttctaacaacttttgaatgagctagaattacgagctgataataatgatacaaaaaaaaagaagaaaaagtgcttagaaatattgtgaatcataacttctaatatttgattatg

SEQ ID NO: 303471 - DNA, 419 bp, Glycine max
  unsure (1)..(419): unsure at all n locations
agcttgtagatttgctatacatgatacatgtcagggtttggtttggttcaaggataaaagggatgccccacattatttccatgacacaaatgcaaaaatgatgatttggaaactttacgcaaaactggtcatgcatgcacctatgcggacactcaagtgtcaaatttttatggtcatgtgatgctagggctcaggattcgtttcctctattttaatcaacccaatgtttccaaaatatgttcttttatcaatttgtgcattcatccgagtccatttcgggcgtccggngaaatttcacagcattcacccttcaagtgtagacacattttccaaaaattgcgtatgatcaatgaatgttttcaaagaaaagttggaagagatctctcttaagagcatgatggtatttcagctagacaact

SEQ ID NO: 303472 - DNA, 402 bp, Glycine max
  unsure (1)..(402): unsure at all n locations
tgtgaaatctcaggatggaccattgggtcaagcccatctcatcaaagggttatatttatttgatagtatgatgaaaaattgcaagaatctattattccgaaaattaaaaatataaattgttacttgtcccttttttcttggctaggtttgaatctgttctcagcactttggaagatgcggttaatgatgcccccaaagcaccagagtttcttggccgcatttttgccaaagctataacagagcatgtagtctctttgaaagagattgggcggttaatacatgagggtggagaggaaccggngagcctcttagaagctggacttgcagctgatgttcttggaagcaccttggaggtaataaaaatggagaacggtgatngctgtttgagtgagatctgcacga

SEQ ID NO: 303473 - DNA, 404 bp, Glycine max
  unsure (1)..(404): unsure at all n locations
tcacagctganagtatagaatggtcagtaacaatatctctgaaatttatcatactaaaaccaaactgcacaccctactcacacgcctaagatcactggcgactagaccagttggggtagagagacccctggtccatgtggatcctgctaccgggaaagcagatggtccctacaaaaagaagttaagaacctatttggggatcgtcgctcgtgataaggtgaatgtcacatacgagaattggaagcaagtccctgctgcttagaaggatttgatatgggaggatattcacgtattttagttntcatgttgcatattgtttattaaccaaaaattcaaatttagtaacaataaaacgtaattcttcgtttgtcaggctgaatgtgatatccctgaagcatctgatg

SEQ ID NO: 303474 - DNA, 422 bp, Glycine max
gtactatcacaagcacataaacacattatcttcattattgcatcacacgatactctatttgaaaatggatcttttactctgtacctgcaaggactgctgacccttccacctgatagttcattgaatcaattgacaaaatatatcataagatataagtctcaaagttcataaatagagagagccacacggtcaaaataagcaaactaaccatgactgcagaaacaaatattgaaataaataatataccactattatgtgtagtggatctttccaatttttgtacctaaaactcgattttcttgttaaccaaggccaaaaagaccaccaaaacgagacttgtcaaccacttgagagcctaactgaacttgcttagattataattttgctcttacgaacttacaatgttataacctcggtgaaat

SEQ ID NO: 303475 - DNA, 311 bp, Glycine max
gtgcattcttagatggctctattcaacacgaactatatgatggtcaaccccctacatcctataactcagacatgtcctatcacgttttaaattgagaaacgctttatgtggcttataacaagcccctacggcttggtgggagatactgactaaatcccttctacaaatggacttcactacatgaaagggtcatactactcgtcttctatcagacaaccacatcagatcatattcgggcatactgatgtggacgacataatgctcggaccgactgcacatatatagtgcaccgaagtctctcatctacgtgc

SEQ ID NO: 303476 - DNA, 429 bp, Glycine max
  unsure (1)..(429): unsure at all n locations
agcttgtaatgatcttagatagaagtgtgagattaagttcttgagtgaaatccctcttatgaggtgaaaatctatattttgtgcagtccaacacaaatctatttctctataaaattccagcattggctggcaaaggtgaaacccaatggtgtagctagtctagttagggctagaattaaagtctagtggggaactgacaggttgttcaaacttagtggtttgttgtttcaattgtgaattggttgtgttagtggaatatcatatttaagggtgaggactagacatagcccaaggttagggtgaaccagtataaaaaccttcgtgcattnttctatattcttactcttgactntgttttgcatagatctgacaaaatacttttgatcaaaacattannattgttaacctttcatcttaacaactaaactg

SEQ ID NO: 303477 - DNA, 402 bp, Glycine max
tctcagccttgcaatggcaccacccacattgtgaagtgcaaaatttttaattggctcctccttctcctcctttgggctcacggttaaagcaagaaaaaggagaggaaattggttgttttgtgtctttgggtggctaatgtaaggtgagagcagagagcttttacttgtgcactaagtagaaatgaacaaataaagagagaggtgggtgagggagtcagggtcaagtgttgaattggataaccaagttgttggggagagattttgccttgcatggtcagtcccctttccctttggtgggtgcggttttggcatgatggccctttggggtttatactgtgtaattatcttacacagtgtaatcttgtattgtgaaatctttgcaatagaatttaattttctact

SEQ ID NO: 303478 - DNA, 406 bp, Glycine max
  unsure (1)..(406): unsure at all n locations
agctttaaaagttttctggtttccaaaccttgttctttcacagaaaacaaaagtgtgttattcatctttttttattctcctctccctttgccaaaaagaattcgccaaggactaaccgcctgaattctttttgtgtctctcttctcccttttccaaaagaacgaaggactaacctcctgaattcttttgtgtctcccttctcccttttcaaagaattcaaaatgacacagtctgagaattcttttgattcttccctttcccttaaacaaaagatttcaaaggactaaccgcctgagatatcttttgtttcctcttcacanaagttcaaaggactaaccgcctaagaactntgtcttaacacattagaaggtacatactttgtggtacaagtagagggtacatctac

SEQ ID NO: 303479 - DNA, 428 bp, Glycine max
  unsure (1)..(428): unsure at all n locations
tagagccatagtctccactccccatctgacaatgattttccctacactgataagggagattataaccatcaagtctaaccaaaagcaagcatgctagtgctatgcatagagcctgaagatagcatcatatcctcccatccgggagccgaccatgcctcatcccatagtggttggaagcacttaagtcatgacagtggatgaagggtctctaatccgagctctaaccgtctaccaagccagcctggatggtgaatttgacatagatccgcaagacgacacctctgacagaggcctaaaacccatcaaagagcttgtacagctgtaactcagacctagaccggngtagtgcactcggcttagtagggacctcactagttatgagcaccagcgcatcgccgacatggctatgcaaaatgcatatttatttt

SEQ ID NO: 303480 - DNA, 305 bp, Glycine max
agctttggttaatgatttctatacaaaagttagtcatataaagcgactaacacacattatcatcaataacaacatcattctcattgatcgaggccgtacccgaatcaaataaacatgaaaatgcagtaactaggaagtgatcctaggtcgtttcccaatgagcaatgacaaaccaaatgttcataatatacttgcgcagtaacagtaacgattggggggggggtttgtttgttttgtgattaaagagcacaacaagtaaactggaatatgaaactactaatattaaaaacggcgtgttacctctg

SEQ ID NO: 303481 - DNA, 429 bp, Glycine max
  unsure (1)..(429): unsure at all n locations
tttctttgtgggttgatgagttctgtcttgcagaatgtcgtgatcactggctgacatattctcaattagcttagttgcttcttccggggtcttcaactttattttttcccctgcagaagcatctagtagttgtgtggtttgtggtctcaacccatctatgaacatattcaattggattggctctgaaaacccatgggtgggagttcttctcaataaacctctgaacctctccaatgcttcactcaaagattcatcagggaactgatgaaatgaagatattgcagctttcccttccacagtcttggactctggcaagtatttctttaggaactnttcaacaacctcttcccaggtttttagactgttacccttagaggagtgaagccacctcttggcctctcctgccaatgagaatgagaataggccgag

SEQ ID NO: 303482 - DNA, 426 bp, Glycine max
  unsure (1)..(426): unsure at all n locations
agtttcttcttgactaatatgatggggctggcatacagattggtgctgggctggataaagccagatgacaacaattctctgaccaacttctctatttcttccttctggtaatgtggatacttataaggtctcaaattacgaatttgagccgcaggtttggtgataatcacatgatcttgtctcctcatgtgtggcagcccttgtggggtctgaaaaactgacgtgtatgcctccaacacctcctgaacatattgtggaatagtgatttgttcttcagaatgctcaacctgattgcactctaaaataaagccaaggccttgatcttgtaaggccccttggatgagcttaatagaagccgatgccttgatcattnttggatctgccttcagcactgtagtctctccttgtaccttcagcactgtagtc

SEQ ID NO: 303483 - DNA, 420 bp, Glycine max
tgcattgatgaaagtgcatacattaaatccacatgtttgtttatacaactgctagtcttcatgttcatgtaaattacaaaaacatttaaaagatttgaatacagctcatgcagcctctttgcaagctctttatctgaactctgaagaatgatcaatggacataaaactgattaatactgtgaactattaaggagttactgtagcattgcgcatgctcagcaaagctatcaagtaaaaagattgaaaatacaaagacagcattgtatgtgcataagaactataggatttcttaatagaaaggtacatcagataaaatcagattaaaggaaggttcttgtttggcattaccgattgagtcacccggaggcaaggttcctaattattctttgttgaaaggtgatgaactctttggatatttga

SEQ ID NO: 303484 - DNA, 324 bp, Glycine max
ttttgcttatccttgcattgctgcatgtgtggctcgtgcctttcgcggtctcatatttgacatatgcagggagcatatgactaagatgtggtcctgtgtctctggagacttcatggatatgtgtattgggatgtgaaaatgtgtttctggccattgctccttttttagcatcgttgattgtgttgaccaactcatagcacatattgttcacctttatcgagttgtatatgttcatatggatattctcacgagccatgagttgctctgatgttgcataccattatcgtatgatggactgctgcgacaccctctacccctgacata

SEQ ID NO: 303485 - DNA, 418 bp, Glycine max
ttctttgagttgcctaatcttctttttgttggcacttgctatgaggatgtcatccacatacaagagaagataaagaacacacattttcccctttttcaggatatatacacagttgtcatatttgtttctaatgaagccatatctgatcaagaactcatcaaatttcaggtaccacattcgaggactttgcttcagtccatacaaatattttttcagcaagcacaccttgttctccccttcttcaaaaccttctggctggttcatgtaaatggtttcctttagatttccatggagaaaagctgtttaacatccagctgttcaagttccaaatcatactgatttaccagaccaagtatgattctaaatgagcaatgcttcacaactggtgaaaaaatctcattgaatcaatccttcacct

SEQ ID NO: 303486 - DNA, 435 bp, Glycine max
agtcttcaacgttcattttcgagcgtctcgataagttacgggactcaatcagacatccgagaaaaaagttattgtcgtttgaattagctcagaagttcaacattcaatttcgagcgtctcgatatgttacgggactcaatcagacatccgagtaaaaagtcattgtcgtttgtattggctcagagcttcaacattcaatttcgagcgtctcgatatattacgagcctcaatcaaacatccgagtaaaaatttatggtcgtttgtattggctccgagcttcaacgttcattttcgagcgtctcgataagttacgggactcaatcagacatccgagaaaaaagttattgtcgtttgcattagctcagaagttcaacattcaatttcgagcgtctcgatatgttacgggactcaatcagacatccgagttaaaagtta

SEQ ID NO: 303487 - DNA, 430 bp, Glycine max
  unsure (1)..(430): unsure at all n locations
ttcagccaattcacccgacaataactttttactcggatgtctgattgagtcccgtaatataacgagacgctcgaaattgaatgttgaagctctgaactagttcaaacgacaataactttttactcggatgtctgattgagtcccgtaatatatggatacgctcgaaattgaatgttgaatctcaaagccaattcaaacgacaataactttttactcggatgtctgattgagtcccgtaatataacgagacgctcgaaattgaatattgaagctctgaactagttcaaacgacaataactttttactcggatgtctgattgagtcccgtaatatatcaagacgctcgaaattgaatgttgaccctctgagcatattcaaacgacaataactttnttctcggatgtttgattgagtcccgtaatatatcgag

SEQ ID NO: 303488 - DNA, 176 bp, Glycine max
agtttggccttatcgtcccacaggccacacggaaggcagagggaagatcaccacaacagacccagctcaacatacgcgggaccaagtatcactcaaaacccgaaacttctgacatgcgccacactgatcgcacatcgcatacacaccacactgcgaccaacaggcactgagcacac

SEQ ID NO: 303489 - DNA, 375 bp, Glycine max
acacaagcagatggagaacagtcatcttttgcacaacagggaacattgcagttcaagtatcccaagcacatggcaggtactgattttgatgcaacggcatcttattatcacaataaaatgctccactatgtcgaaggcttgggcaactgatgagaccgtagcctaactctcttacggcccttggaaacagcgaatgcagacaaactatggacagcgagatctaaaactgacaccaatgcatgcatcaccggaacgaggggcgcccgttcaacgctctaaaggaccaggaggatgtaacatgaatatttgccacctaaagaaacaagtaagaaacttaaccccactagaaagcccggcccggacattctcacattg

SEQ ID NO: 303490 - DNA, 427 bp, Glycine max
  unsure (1)..(427): unsure at all n locations
agcttttagttataattcccaaggtggtcatatctctcttgatggtttctagaggtatcatccccttcgacaaacatattgcagcagtagggactaccagcaactatatgttatcaaagagaaaaactctagatgagggttcattgttatcaagcaagtcagagacccagcatgaccacagattcacctcaactccttatgttcccatggacccgggtatagggccccttttcaattcaccgtgtgtgcaaaaaaggtgttggtgttgtgtgcatcaaatgaatgcatatttatcacatgcatacattanaacacgcttanagcatcgaagaagtttatacaagaacatataggaaaagggaaaccgatgatagggaaaacacaacttttgcacaaaagaataataggcctaactctctaanaacag

SEQ ID NO: 303491 - DNA, 427 bp, Glycine max
tcttatccaaggctcatcttggtggtgaagctccttcttccatgacttattccctagtggatggcgcctcctctcacctcttctcctttgtcttccactgcatctccatggtggaaaatcaccattaaaggacctcattgaagctcaaagatgcaacctccatagaagccccacaagcaagcttccatcaagtggtaatcagagcacaagagcttcaagtaggtgctccttaaacctccattaattttttgctttaccttctcttccattgttgtttcttcattttttctccatgtatctcctcacatgtcttgtgataaatgtttttaacatgattctttagagtttccaccgattaaacttgctatagaagctagatttgattttctatggttcaaatttcttgttcttgttgttgaaccatgaa

SEQ ID NO: 303492 - DNA, 439 bp, Glycine max
agctttgagatggagttcatatatgaatgtggctaaacatactacattttgcttaggagactcttttagttaaggttcatgattatgaatttaaaaatttctaaacaatgtaatgcatctttcttgttacataatctgagaaatttaaagacattaaaccttcaacactcccgacatctaattgagatcccaaacatatccaaggaaaaaaaaaacttggaaatgttaatctccaatgttgtgaaagcttgcatcaggtccatccattaatgatatctcttcccaattctacacatttggaattaagaggctgcatacagattgaaaaccttgatgttaaatcaaaatctcgacttcgtgaaccttttctagacaatcgtttatctctcaagcagttctcagtgaaatcgaaagacatggcaagtttgagttacatgac

SEQ ID NO: 303493 - DNA, 429 bp, Glycine max
tgaaggatccgagaagcttcttcacaatagtttcttttatacttttcatcggcttgtttcaaaagaaattttttttacctaaaattagtcttgcttttgcttattttaattgttgaaatttgttttacttatgaggtgtttgacaaaatgtttctaatagaatcaagatcttttttggtttaaatttttagtttcaatttttgtatattgttctttttttgtaaaaggcttgactaggttacatttctatgtttcatttgaacatgatcttattaagcttgaaggatccgagaagcttcttcgcaataatttctttcagacttcacattggtttgtttcaaacatgaaatttttttacctaaaattagtcttgcttctgcttattttaattgctaaaatatggtctgcttatgacgtgtttgacaaaat

SEQ ID NO: 303494 - DNA, 316 bp, Glycine max
agctttaagaataagatggcctcagcaaattccttatttccagaaggaaattctatcaacagaccttcaatctttaatggagagggttaccactactggaaaacccgaatgccaatttttatcgaagccatagaactaaatatttgggaagccatataaataaggccttatatacccaccacagtagaaagagcttcaatagatggtagttcatccagtgaaagcataaccatagaaaaacctaaagatagatggtctgaagaggagtataaacgagttccatacaacctctaaagccaaaacataataacatctg

SEQ ID NO: 303495 - DNA, 423 bp, Glycine max
tgtgcaaatcaaatcactcctacatctcatttctattatgcattttctttctttacccactcctcacgtttggttttttagggaaaaacaccataactaaacgcgccgcaagggatccctatcgcaccagatccaaatctagaacgatgggtgatcaagaggagacgcacgaacagatgaaagccgacatgtcggctctgaaagaacaaatggcctccatgatggaggccatgttaggtatgaaacagctcatggagaaaaacgcggccactgccgccgctgtcagttcggctgccgaatcagacccgactctcttggcgactacgcaccatcctccctcaaacataatacgactgggaagggacacactggggcacgatggcagccctcacctgtgatacaaccgagcggcttactcttatg

SEQ ID NO: 303496 - DNA, 573 bp, Glycine max
  unsure (1)..(573): unsure at all n locations
cgcgcacccacagcaatacatagacnacgcaccgctaccgccatatncanncacccccaagcgagganaattgagccagaaacctcgacaatcaaggcgaaacgagcgcggacnccgggancctctagagncgacccgcaagctatgcagcttcaacatccaagacatcaagagaacgcgaacacacacacgaaccagcgactacgccgacaccgcctctgaaagacaaggaaaaggcactggcagcaaaactaaacaagctctggactgcatgcgcaccgacaccatccgagcacgacacctaccagacgcaggccgaacacaacccagatacgacgcccaaacatacgctcgcatacccacaaccccggcagcgccaccgccggaacaacagaccttcacaagaacaaacgcgaaccccgaccaacacccaacccggcccgcccaatgcacccaccccacgcccagcaaccacaaacctaacagccccccgaggagcgaaccaccaaaagcacgccgacgccacacagacacgcagacacaggacaaacccctcacgagcacagcccaccc

SEQ ID NO: 303497 - DNA, 405 bp, Glycine max
tatcaagctcttcaatgagagatttgttatttactgtttgcatttccaggctgctagtgcgggtttctatctggacataacaaaagttattaagacaaaacaaagtaagaggccagtgcttttcaagaactcctacacctgaaattatatcacctagaaaagcaaatagaactgaaatagtgaaatctcataaagcagaaagcaacttccacagcagcacaaaatggtcactgtagaaataattgtgaccataattcaactttacaaaggtaaaatccaattcatattaatatcattttaaactcactgaaaatatttggcatgaaccaactgtcccaaaatatttggcgtgagggtgcgggtgtgtcgctgccgttcgacgtcactgccattcctcgctgctgg

SEQ ID NO: 303498 - DNA, 393 bp, Glycine max
tgtaagtatttgttggtataattcgcctgttccattttgcttttattgtctctagaggttacttcctcgttgacatcttttgttctgaatggaattgccataacaggttcgctgttactgtctttgatatttggtagctgacattgtgttgtgggaggtaattccgattggattaactcaccatccttcacttgccaatttgttatgacatttgttgttggatcacctatgatgtcttgtttccaagggtaatctatatcctttctgatggcataagcatgaaaccaatcaaagaaaacgacatctatatttgactctgtcgacaaattcgtataacttgtcttggattcgccttctgtctgtacccttgtaatgttggagaaaccatctcct

SEQ ID NO: 303499 - DNA, 404 bp, Glycine max
agctagtggagccgaggcttccgcacgagagaagagagaatttgaaattttattctttcaactaactaaaattccttttaaaattctaaaattttgaattccttttactaaaatatttaaacagttacttttaataaaaaagaatttaattccctataaaagatacattacttagttaaattatcctatccaaacacacatttttaacaagaaattgtagattgattgctctacaattgatgtatttaattaaactatgaactgaggaagaattctatttcggaacttctgttatgtagttatgaatgattattaaataaatgataggtgcacaagtgacaaatatgagagtaaagttgaacattttttttaatctgctccaagacatggttctcacaataatc

SEQ ID NO: 303500 - DNA, 415 bp, Glycine max
taagggtccttagtggcataatcacacattatattttgtacctctaaaaatatcatatgatataagaatcaaacttatataatttcctaccaactaaacatgtgatgattaaagcctatgaataatattttaatttctttattagataataataataataataaatatccttgaatacatcgtctcgaagttgcatacatacgtagccacaaataaatgttacatatgtaaattatatcacagtaattctaaagaataaataatctttttaaaaggacaattttgatatattcatatatctttaagtagatataatttttaaaacataagatgattataggtattttgctagatatcatatagagataatgatatattaaagttgatgtaacatatccttgcctaagtgatcact

SEQ ID NO: 303501 - DNA, 428 bp, Glycine max
agcttgtattactactaatgtatgctaatgttggtggcagggaagatgcaagtcacgaatgagttattggtgaacaatagctattgggctgaaagagtaagcacggttgtgctttataatcatatcttctaattgttagggataactgcgtaagtgcatcctagcttgtgttgtgaatcgtaaaaatgtatgccctggaaaggacatgtttgatattttatttttgttggaagagtcatatagtaaaattatgattatttagctactcattttgtgttgtcactgttttaaataattgaattgcctttccattcaatgccattgttttgcactggtttttattatccattgctaattatctgaagattatgacgtgggaacttgccttgaatctgtgcggctttgacgagaaacatattgtagcatat

SEQ ID NO: 303502 - DNA, 403 bp, Glycine max
  unsure (1)..(403): unsure at all n locations
agtcatcaagagaatataaatttgtgactatggcatgagntncaaaaaatcatccttcaacaaccatattatcaatcatctttgaatcatctatcttttacatcatctttcaacatccttgaatctatctttcaacatctctcaatatcttctttcatctctttcaacactttcaacaaaactttctaattcatttctcttcatctttctaaaagttttttatcaacactttctcttccaagaaaagttctttgttaaaaaacttgtgttattcatctttttcattctcttctccctttgccaaaagaacaaaggactaaccgcttgaattattttgtgtctctcttctcccttacaaaagattcaaaggattaaccgccttagaattcttttgattcttccc

SEQ ID NO: 303503 - DNA, 351 bp, Glycine max
tttcaagcttgccttgccccttgatatattcgagggactcatggtcactatgaatgacaaattccttgggataaaggtagtgttgccatgttttcaaagcccgcactaaggcatacaactccttatcataagttgaatagttaagggtaggaccacttaacttttcactaaaataagcaattggatggccttcttgcatcaacacagccccaatcccaacatttgaagcatcacactcaatttcaaaagatttttgacaagttggcaacgcaagtatgggggcattagttagcttttgcttaagaacattgaaagcttcttcttgtttctctccccatgtgaaaccaacat

SEQ ID NO: 303504 - DNA, 431 bp, Glycine max
  unsure (1)..(431): unsure at all n locations
ntagctttgtccccaaggcttcatgtagacttgtcctttatcgttaagngaacctcggatccctatctaatacaatactagaaggaattccatgcaaccttactactcccttgatgtacaactccactagcttctacattctatacttcatattcaccggaataaaatgagcagatttggtgagtcgatctactatgacccacacaacatcatgtccacgactagtcttgggtaaactagatacaaaatccatagatatgctctcccatttccattccggaatttccaatggcttcaattctcctgatggtcgctggtgctcagccttagccttttgacatgtcaaacatcttgctacatattcagctacatctttcttcatgcccatgccaccaaaacttctcttcaaatcttggtacatcttagtcatt

SEQ ID NO: 303505 - DNA, 327 bp, Glycine max
gaatctgtacttcctaagagggagcgccacccactccacgtcattacaaactacctcatttcttcctctatagcccttagccgaatacaccttcgatagggtctctatttgacgcttaaccctctcatgcaacttgtttacaaactctgacctacattacccttctttatgtataaaataagtgtcgagtgggaggggaatgatgtctacaggcgactagggattgaacccatagacaacctcaacacgagatagcttgatggttctatgaacccccctatatgaggcgaagtgtacatgacgaagatactcatcccaagacttatg

SEQ ID NO: 303506 - DNA, 408 bp, Glycine max
tatcataatcgattacatagctctttttgagacaattattgattctttaggagtctctactttaatcgattacttctctcttaaaatgtgcttcagaagtgatcacaacttttaataaaaatagaataaggtgtcgtaatgggtgcaagctatgtaattgattacatcaagaatctaatcgattacattgttcttgaaatttttccagttgttgggaagaacactttaattgattgaaatgataatataatcgattacttcttccaaataatcgattacattgtatatttaattgattacatgcggttataactgttttctctataaatagacaccttgtgttctgccttttaataacatctaacaacttctgaatgtgttagaattatgagctaacattagtaaaac

SEQ ID NO: 303507 - DNA, 318 bp, Glycine max
  unsure (1)..(318): unsure at all n locations
ttgcattttactttgttgctcgatgtgtcattattttctcctatttcttaacccttttggtcaccattttaattattgattagccttaattgtcaaattaattatgcagctttatcatttgggcctacttgactaattttgtgtttttaatttaatttcaggagaaatataagccattgggcttggacatgaagagagcagacaattttattttattaaatcttatcttatccagattttatttcgtccagattttatttcatccaatcttatcttatcttgtccagattntattttattccatttatgggcttggac

SEQ ID NO: 303508 - DNA, 422 bp, Glycine max
gcttctacaatctccccctttttgatgatgacatcttctgaaatcaagaaacactcacacactttttcctagtcgatcactcacataaattctccccctttgtttttgaatctatgcttatcttaaaaataagttgattactcatgtgaattcttgatttaatcccatttctctccccctttggcatcaacaaaaagccaaagtgcgtatcaaacttaaggtatacaaatataacttaaacatccataaaatgttcatgaaaaaatatcaaccaaatcatgaagcaagaagcaagaaccacgaaatccatgaagcaaacaaccatgaatagattaattataaactccacatggtcaaataacatacttaatattggtccacacataccatgcaaataaggaaatagtaaattgttcacatac

SEQ ID NO: 303509 - DNA, 570 bp, Glycine max
  unsure (1)..(570): unsure at all n locations
ccaccgcaccgcacgaacggtagacggacgcgcccgataacgacacacnccncannnnnaagagcgcnnnntttgggcctgataccntcgaagcncaancgancanggcacgcggggaaccnggagagccgaccagcaggcaggcaagcttgcaatgaggccgcagaagcngncgcagaggcacgacacgagccggcggacacgaacgaaacacacccgcagcagacacaagagagagaccaggagccgaaggccaacaccgacacaacacagcagggcaaccccaaccgaagctgacgcgacaccccggcgcaacacacgacaacgacagaaggccggagccagcagcaagacccagcaaccaacgcagcccaacagcacaagaaaagccagccataacaggagccgagcacaggaaggncgacgatacacacganacacacaaccgaagaagcaccgatggcgcccgacacagaaaccgagcgccgaaaacaccgaacgcatgcgcccgaccaacgagcaaccagaagacgccgagaaaaactgaaacacaccccggacgaacaaacn

SEQ ID NO: 303510 - DNA, 342 bp, Glycine max
agttttgagcttaaattctgactcaccataaaccttgacccagggtgagaatgtcaatccttaccctcggaagcataatagaatagaacggaaatttccaatcaaagaaaagagaaggaatatttccaatgatagaggaaaaaagagaagaaaggaaattcccaatcaaagagtgggagatagagatagaaaagaaagaatattcccaaccaaagaatgggagaaagtaaaaagggaaggaagctcctggtcaaagaaaccagagaggtctttggaccagataatatctgaacagtacagaatcgtcaccttatgagcataaaggaatgaaagggaaccacg

SEQ ID NO: 303511 - DNA, 429 bp, Glycine max
tgtagaatggccccacatgatacatgtcagggcttgttttggtttatggataaaagggatgccccacattatttccatgacacaaatgcaaaaatgacgatttggaaattttatgcaaaactggttatgcatgcacctatgcggacactcaagtgtcaaatttttatggtcatgtgatgctagggctcaggattcatttcctctattttagtcaacccaacgtttccaaaatatgttcttttatcaatttgtgcattaatccgaatccattttgcgcgtctgggaaaatcttcacagcattcaaccttcaggtgtatacacactttttcaataactagttatgatcagtgaatttttccaaagaaaagttggaagtcatctcttttcaaaagcatgttggtttttcagcttgacaacttatttgttctt

SEQ ID NO: 303512 - DNA, 422 bp, Glycine max
  unsure (1)..(422): unsure at all n locations
agtctttcttgtggccatttcctgcgaggacaaacattttgggaagttagttttacaagataagcttttcttaacacaaaaatgacatgctaatccctccgatttagaatgaactcatgtacacttttaatgtaaaatatttatgcacatgcgtatgtgtagaatatcccactatttatgtcaacgtacaaggacatccaacacattccaactgccatacatatatatttttgaaaagaacacacattctcatgctctangcactgcgtcanaactcacacctaatcacatcctanatattttgctatcacaaactacctacacatatttganacatatatcatacaggctntcattgtttcactcacatttatttatatgcatattggagagctaattacgtcatgcacatacttgcattc

SEQ ID NO: 303513 - DNA, 419 bp, Glycine max
  unsure (1)..(419): unsure at all n locations
nggattgattcagtctaactagggatngaggggtagttatntattctagagcatagaacacaaaagcatgattgattagagaaacatctttatatgcattagctggtctgttagaaagacccaacatttctacctactgctgtcaattttatttacttgcatttttactatttttagcccagacttagttcaatcctgttttaaatcatcaaatatcaatgtttctttcgacaatgccttatttctgaatttaaccttgtcttagactagttccctgagttcgatactcagattcatccgttttgattttaaatacttgatgatccgatgcgctttccggcaaaccgaaattacatcagttgttccttagaaattcgcaacaagagtgtntagccaaccatatagaaaaaccctaacac

SEQ ID NO: 303514 - DNA, 424 bp, Glycine max
  unsure (1)..(424): unsure at all n locations
ccngctacctcgaaaccagtacgttgtgtcatatatactgactcctcaagaaacccatatagcaaagcattgctcacattaagctgatatagttcccacccatgggaaagagcaagagtgatcacagcacgaattgcgacaggcttgaccacaggacacaatgtctcatgaaagtcaaaaccatggactcgatgaaagcccttagctaccaaccttgctttgaactagttgatggaaccatcagcattttcttttactcagaaaaccaacttacacccaatggcttgcttattacaaggtacgggaactaagtcccaagttctgatctcagcaaagcaccatactcttgctgcattgcaccaaccaatccgaatcttctacggcctgtttaacattatcgggtcccgatcgagcagcaataacn

SEQ ID NO: 303515 - DNA, 430 bp, Glycine max
  unsure (1)..(430): unsure at all n locations
gcttgagacattcattcataggggactgagaagagagggtttgttcttattcaaggtcggatgatgaagaggcagttcggctttgtaaagacagaaagaagttcatcagacaagctgttgaacatagaactcaatttgccacgggacacatagcatacatagaatctcttaaaagggtttcagctgcacttcgcaattacattgaaggcgatgagcctcgcgagttctcattagacacagtcatcaccccacctttcacgcctgtgaagaggaaaactggctcaggattcattcccatatcagcanaaccctttgctacaacaggagcaattgagtttgggatctgaccaaactctactttgaaagtgaattaccttaggcctggtggtaacccagcaatttcagttgaggaaaggcctcaatccccgga

SEQ ID NO: 303516 - DNA, 379 bp, Glycine max
agtttccattaccaacacacgttgattcaacatcagttcaatgctcaatgtcctctacaaccgattcaattattatcggtacatcttctgctctttatgttccattctacatctatatacatggattgcccatgggcttcatgtctcaaagtgttggccacagtatcgagaagcatattgggaaattccttgagtacgatgtgaaaaatacttcgagttattggatgtcatacatgagacttcatgtattgctagatgctaagaagtcattgatgaaaccctcgaaactacgaagccatgagaagagctctctgaagttatctcaagcatgaaacgcacgccctttcgtatctttggtccaatgggcacaatgacgata

SEQ ID NO: 303517 - DNA, 423 bp, Glycine max
  unsure (1)..(423): unsure at all n locations
tgtcacttatagtngatgcttatgtcatctcttcatttgatatgcaaacaggtggcttttacttatgaagatggacgccctgtagaaggtatgggtgtagggagaaagataatagatagggtgcaggagacatatcattctgacttaaatggtaaggactttgcatatgatggggagaaaagtctgtttactgttggctctcttcctcaaaacaagcttgagtttgaagttgttcttgaggatgtcacctctaacacgtagaagtaattagagagcatttagttgttgttttggctcttcaaattggttttcgtactattgtttcaatagcctatgatttattttttgtcttctatgaataatggcaattgcagccctgatggtctatgggacaatgagagtgactcaaagaggatgcgaccc

SEQ ID NO: 303518 - DNA, 419 bp, Glycine max
agtgtgtatttgaagttcttgagaggtgctgaaattggttaggcaatagcaaaagacatattcccctgctttcatttactggaagatcaaacgtacttcatctctctcttattttgattaaacattgtaatctttatttttttttatgtgactacaatgtacattacattctcatgatagcatatgtatgatacgacctctattagttagctaacaagtgtaatttattataattatgtagaattcattttttttgaaggttccattggttcttattctaaatacctattcttattttataacatatatggtagtagctgcaacatataaattggcattgaatcttacgatatgcttcttcccctaccaattattctttcagttagaacaatcactagtagttatcttcttgatttata

SEQ ID NO: 303519 - DNA, 414 bp, Glycine max
  unsure (1)..(414): unsure at all n locations
tatcttacctatttatctcccagttgtctttgcatatattcaatagataaaaaacatgaagttctaattcaagatgttttctttgttgcatgggcataatgcaatcactctatgtctagcaatgattttattaagatgtccctacctttgagttctactaaaaattatcctctctcgagcgactaatctctaaaactgatgcatataaaaccttcaatgtatttctactaaggattaccctctttcaagcgccaaacccctaaagatgatgcaaggatgaagcatataatacatttgttggcattttaggcctgccaagccctaactaaaggggtttagcctttcattgtcatgagagactcttacactttanggggttgatatggatggaagaagatggatggatagaggaag

SEQ ID NO: 303520 - DNA, 473 bp, Glycine max
  unsure (1)..(473): unsure at all n locations
aaacaaatgaactgacacgtcgancacngngaactnagaaactccgctggccctgctcatcgggaaaagancttttcgagttttttgacaccccctccagcgctctgcttgcctatgagtccatagtgccttcccttctcggaacatgtctgacaaacttcttgcaaagccctagccaatccttacagatagttgcgcgcatcaaatttgtacgcctaactctacattatgaattaggttctcataaagctgaacctatcgttttttaaaacgctataatgaccaacggctatggtgaccgacaacattgctcgattctgataacgaccaaagcaagtcgctaaccatgcgatgatagtgccagtgcgcgcctgagcccaccacttccttccacctaatatccaatagctacaactcacaataatgttgcccactacagctctaaaagcaattatacaactgcacttaacccc

SEQ ID NO: 303521 - DNA, 352 bp, Glycine max
  unsure (1)..(352): unsure at all n locations
agcttcgttattcagctctagtgctggaccttgccgtgactttttgcttcctggaccaccatgatatcaagtttgagccaagaaagatagctgctcctgatgtggaacgtctttcatcaatatctgatgcccaatcaacatcatagaaagcatagagtgccatacgttgtgaaacagaagcagggcgaaggaataaaccatgacaaatagtacccttgagatatcttaatatccttttgaccacaacgcaatgagaatccaatgaattagccatatactgacaaaccttattaacatcatacctaatctcacgtctagtatgggtagcatactggagggcacncactactga

SEQ ID NO: 303522 - DNA, 433 bp, Glycine max
gaaactaagctgtatatgaactttctcttcattgctactattatctttattagtttcaaactatgcttccaacatagcaagatcatgatctaaaacaccgaggtgaaattggatttgctcatttcagtcagagaagttaagcccattaaaattggcacatatgatacataagaattcagtgaattgagaacatgtattacataataaaattcacataagtgtttcgagacataaaatacatgtcatacacttgattcattcagataacggtcaatgtatattaatgttctcctttgggtgatacaccaacacataacatacaaacataatgatgctaataaaaattcttaacattatttggcaattaaatatgcaccaattagtagtatctatgtcctttgggcttatacataaaactaatgatacacacaaa

SEQ ID NO: 303523 - DNA, 427 bp, Glycine max
  unsure (1)..(427): unsure at all n locations
agtcttatgatgatgaattaagttgattcaagtagttttgatgatgaaaaagatgatgacaaaaagcccaagaaaatgatttcaagattgagtcaacaagttcaagatcaagattaatttcaaatttcatgagaagaaatcaagaagattcaagaatcaagagaagtttgatttcaagattcaagagaagatgaattcaagattcaagagaagaaattaagaagacttcacgctgattagaaaaaaaagaagaagacttcacaagggaagtattgaaaagatttttcaaaaaacaaacatagcacagttntgtttttcanaagagtttttctcanaattttctaagttaccagagttnttactctctggtaatcgattaccagtttcctataatcgattaccagtggcaaagtttgatatcaaaagc

SEQ ID NO: 303524 - DNA, 423 bp, Glycine max
taacaccgatgactatcccaacatagctactgagtatggaatcagaagcatatcaactgttttgttcttcaaaaatggagaaaagaaagaaagcgtagttggtgcagttcccaagtccactttgtccgcaacagtggagaaatatgttgatgtataaactggaaaggaagaaaatgctataacaaggaacgcttgatcataaattatggaccatcttgcttttaatggttttcaacacttcaaaaagtactttgtatccacatcttttacaacatttgttaaagattacattgtataaattccctcttctcttctctgctgttccttctgccatacattacagttcacttcgccaaattctcatgccaagttaatttggcaccattactccaggtttgggagtaaactgaaatttcaatgtct

SEQ ID NO: 303525 - DNA, 420 bp, Glycine max
  unsure (1)..(420): unsure at all n locations
agctttgctgcaatattaaaatattgtttaaaaccaatcttgggccttcatctaaaaatttaagctggtagtgtttggtgaagacacatgactggttttatatctcgaatacttcttacttctcttcttttccagtttttcttggactttttgtatttagtctctcttttttattcaaaggatttagtatcctctccctggttagtggttgttgctcccttttgtctttaatgaaatttcttcttctataaaaattatttgttttgcttacttcctggcataggtatcccagtcatgaccagagctcanacctgccaccctttggatccactatcagctgctgaaatatcagtagctgtagctacagttcgagctgctgnngcaacccctgaggtagatttcttgattntctttcattga

SEQ ID NO: 303526 - DNA, 419 bp, Glycine max
tttgttgaacaaagaaatttcttagtgttgaatgcattttaaatcttatttcactttcaaaacttgtaaacacagtttttcagtttgctaatttaaattagtggacaatgatcttttctattaactagatagtaacattaaaaacaaaattagtacagcattaaaaatagcatggtgcaagtaatttattcaaatttgtaatatgactgccattttagttgagacaacattatcgtcaacaagataatgtttgtggcggctaactgacatctctatatcattaaactaatgcacctgcaatgttcatcgaatcaaattatatttgccatatcaattcgcttagctactaaatgagccttgatctacacgtctgttccctaattcgacgatccttggagccatcataatcataccgatta

SEQ ID NO: 303527 - DNA, 378 bp, Glycine max
  unsure (1)..(378): unsure at all n locations
tcaagtttttggttggtaagaatgcaaaaatataatttctaaattgagagatatattttggtttctaagaatatttatagtgaaaataaagatgcaaaatttgacacactttcaattaatattttttcatatgttagaattcccaaatctaatttaaagttaccctgtaaccaaaaatctgaacttatctgtttaaggatccaaactcttcctatttggacaactactcgttggctcaattgagattntgagttgctatgagaatgaatttttagtaactaacggatattntcattgaaaggaaaacaaaattttccataatgaacacatgatgttggaagaccataacaaagtttccactcatctagatctttgatg

SEQ ID NO: 303528 - DNA, 430 bp, Glycine max
  unsure (1)..(430): unsure at all n locations
tactcagcttcacataggagctgcatcatgtggtatcattagcattttcatctangngatgttcttttgcttcctctatctttttattcggtcaattcactttaattccttgttcttcatcttattctccatgtatatccttcattgtcttgtgttttgatgctgtttagagtatattcaaaaaataaaccgattaaatcttagatctacacttgttcttgcatttctatggttcaaattttatatatctactcttgaatcatgtttttgtgttgattttaggttcaatcattttccagtcataatcttcttgtactgaacctttaaatctaaattntattccaaaatattgattataaaaaaagcacanaaatctaagtgtaaatcacttaatctatgttgtcttagagtcatgtntagtcataataat

SEQ ID NO: 303529 - DNA, 434 bp, Glycine max
agctttggttatttttagcaacgggacccttttaatttgtataatttattgtgtggaaaaagaaaaaacgacaataataatatattgcttaatgtatttgatccagcttgcttctgttcttcttggcgatctgtattctgtacagagatgatccatattatatcatactctatatatttttctatgatccttgatttaatgtgactgaaagagaataattgagtggaaaagaacaacaaaagcattgaattttagtcacttttactgagacaacgttatgaaatagctgccatatatggtctccataattgtgcttctgtatttttcttcttcaatcattatcaccaaatcattatttggtatctaggtactctacaacggaggaatcagtagatatacgtgatgttctatcattaggtctcattacgcatcat

SEQ ID NO: 303530 - DNA, 447 bp, Glycine max
tctataatactcagcttaataaatgagaggaaaaaaacaagagttcttgtaatatctgtgaaataatttttgtagagattattttcaggagtagaaaagtcactccgttgtttagtaattttgaggcatttaattaatctaacgtatcagattttgagtttcacacacaacaataattccttttactttggatcacttgttattgttgcacgcgtagctttctcacagtgtgaaggtgatgaaactggggtttagtagtcaatcttgttcttaattgattgtgtcaaacactcaatgtcatttcaatcccccattctctccccctagatttgggcttgcctaaaacaacaccaactcaaacctaacacctgttcacgaaaaagatattccaaattagggaaaggggcaattgaaaagagaagggtctaacggtaaaatgatcaatga

SEQ ID NO: 303531 - DNA, 412 bp, Glycine max
  unsure (1)..(412): unsure at all n locations
agcttgtgctttataaatcactcctacattntatctctagcatgcatagtatgttggtctcgtcctttgtcacgggaagccggaaggtccatctcaccttcttaattgtacacatggagcactgcgcccccaaatgcgcaagtaagaagagataattttccgggctctcgtgtccgtaaaatgcattcatatcatgcatcgcataagcatctcttcataacatcataatggacatatcctgcatttgtccggtcatggcatcatcatgcatatgcgttcaacaaactttntggtctgcaaaattgcataccatttgttttcatgtttgctcatccttgcgtttcctctacaaaacataaaaacatataatgtggggagcgtgaaacttcacactacattcttagtttcatgt

SEQ ID NO: 303532 - DNA, 426 bp, Glycine max
tgaaggtgtgtagcccaccatcttttcatagtagaattctggttatgtgtctactatcattgtcatcattttttttctccgtcattgaggtgccacttgagctgccaggtctctccacctttgggcgtatttttttgaaagatctgtgccccctttttgcacatgttttgtagttgcatcctatccgaagacattatactaacactgcctaacgaaggcaaccactaggtccttccaagaatggactcgggaaggttccaagttagtgtaccaggtaacagctaccctagtaagactttcttggaaggaatgtatcaacaattcctcatcttttgcgtatgcccccatcttccgataatacatctttagatggttcttggggcaagtagtccccttgtacttgtcaaagtccagcaccttgaactt

SEQ ID NO: 303533 - DNA, 110 bp, Glycine max
agcttggaatctctgtattactggcgccttctggtcatgagctagcccatcaaccgatgaccatagtttcagaacgatacattcgtccaaaccaagaccctccttctgtt

SEQ ID NO: 303534 - DNA, 427 bp, Glycine max
tgtccctctactggcgaatcaattagggtcaaggacttattatgggataattgtgagctcaggagcgacgaataaatcctttcatcactcctcattactcccgagctcacatttatttcaaaatgagtctaactggatcctacaaaatcaacttataagatgaggattatcttcacttatatattctactttgactatattactatgcgaggtaagatctccaatgcagccaagaattaaacatcttaaatgagaagcttgcatagcttacacatgtgtagaagattcgataacatgtgatactataggtccaaccattatagttacatagattgtggtactattcggtgcttgttacggtacaggtttggtacatgtacgcgaccttgacaagatatggtgcgtgggaatatgcatgtcggtacgt

SEQ ID NO: 303535 - DNA, 432 bp, Glycine max
  unsure (1)..(432): unsure at all n locations
agcttggacgttgggcgtgttttgtgggactttgttgttgagaacttttttggatttaaaatattgcttgtgaacaattttatttgcattttccttgtactttattctcaagcaataattattgcttgtaaaagcaacccaaaattatgtaagggtttgattcttaaatttaacaacccaaaatttaagaatccaatcatacgacagttgtagaagttgctctagcattgcaattatgacaacaatgaaactcccctgaccaaactctcgggagatgctgtaattattttcgattagttaattacttatatgtctaattaatatgattaatcacttatataattaanaaatattcaatatgtgatgttaaggttatatttatcgagatantttaattaatctttagttcttgtatcgatttacaaagttatt

SEQ ID NO: 303536 - DNA, 439 bp, Glycine max
  unsure (1)..(439): unsure at all n locations
taagaataacatnntttttaatttggtttgattggaataatattttattatatatatatgtgcaatataaaaatagaaaaaaataaaaaagtataaactacgtacaaaaataaatgtaccacagaaatcatatactttaaaatgtttaatattcatttatattacatcaattttttttaaaaaactaacaactaaattgaccgaaaattacatcaattaacataattggagtgtgaatgtgtacaaaatgaattaattgtaattagataatataaattattcaaatataaaatgcttcatataaattcgtgtatcattatttttaggttttcatagttctaagtgtttttactatttaaaattattcatcattttcaccttatttttgtttactaattaatatgtttatattatatatttcactcatcatttttaattg

SEQ ID NO: 303537 - DNA, 272 bp, Glycine max
agtcttgtttaatatgtaacaattgaatacagttattatcccaaggtaaatgaaaagacacttattagtcaactatagttcaattatgtaacaactaaatatatttattatccccaagataaatgaaaagatatctttttagctcaaaattaaataattcatccaaataaattctaactcactattgcatctggatcgtaaagggttgaattcattgtactctttaacattggttaatttattatctttaaattatagaaatgagacaatta

SEQ ID NO: 303538 - DNA, 425 bp, Glycine max
  unsure (1)..(425): unsure at all n locations
ntattatatattcattnttctttttacagtttcttttctttcccaacagatacttcttctcccccaatcaagcattatttcttcttcttcccccaaaaaagtcattgcacagcccaaatctcccattttcaacacgaaactcaaagtgaagcaaaattttgtaacaaattacttctttcaatttgatatgacaatttagttcatctaagttacgagagcatgcataacaaaatttttactgtcaaatacatccaacaatgtcatgcaattttggtcattntttacaaattgaaaaaatagatgttgggataaatttatctcactttttacaaagagataaaattttatttttttctaatttaggaactcaaatggcagcgcattacaaatttaagaactaaattgagtatttattctataattct

SEQ ID NO: 303539 - DNA, 430 bp, Glycine max
  unsure (1)..(430): unsure at all n locations
agtttggagttgcaatagtgctaaggtttctggttttagttactccatattgtcgacaattaacttggggtcctgtcttcatgatttttaagtttaatgtgctaagttgtttcaagtttggtctttggcaagtgtgtacaaagatattcatgacccgctaattaataggaaagattcaacacctataggatatgaagaaacttttagcgtattgctaaattgctgatttcttaatatgatgaaagactaactcaatgatgtctactccaatatcaatgatatagagtcttgggaaattgagggtttttgcttaaaaaaattcaaatactgaaagtnttatttccttaatatcttggttctataaagattccaataaacaagaagaacagagacacttatcttcaaataattatattgtctcttacattga

SEQ ID NO: 303540 - DNA, 426 bp, Glycine max
tgtcatcgtgagacatcagaggctagtattttaatttatgtgggtaagaaaaattcaccaaattgatagagaaaaatctaaaatcatacatcttaggcaaataaggcatgctagcccccaacattattgcattttgattccatctttagacattcaaattgttgtttatttttcctgttatcttttcctttgccttagtctaaatttcaaacttacaattcggtatctctttcttcttttgtttctcctcatttcttaataattggatttgcatcacttaagtacaaccaaagtccctctggatttaattgttgaacttcaatttcaatctttactacttgtgataaaattaggacacttgtcaatctattaacaagtttttggcgttgttgatggggactttggttttcgtacttggttgttaca

SEQ ID NO: 303541 - DNA, 425 bp, Glycine max
  unsure (1)..(425): unsure at all n locations
agctttgctataattaattntttggattaaatattgtcattttttaagggaacggattaaataatgtcttaatacttgtaaacaggctaatgtttgtctttagttcctcaaaaataaataatttccttttgtcccttatttataaaaaatgtgtcggatgcaatcgttattttttttatgaccacatacctacatttctataaatcaaagactaaagaaagacaatctattttggagtgattataaaagaacattacccttgcaagaactattttcatattttttttttccttttagcatttgcaatattcttaaacatatgagaatcttctcttaaccattaacattntatgaaattntattgctctcaacattntcatattnttcaagactntacactnttagttnttcatatatttaaactt

SEQ ID NO: 303542 - DNA, 415 bp, Glycine max
  unsure (1)..(415): unsure at all n locations
tcacttgctcaaattcggtcagactctcgtaagcagctttttttgagcaagctcgggccaaagaattcacccagcaaagtccaagatatctttccttcccgtctttgtatctgtggattaacagagccctgtcaatatcaaaatagtaccaagtgactgtcaagtgtcaattgcagagaagacatcaatgtattaaaatcagtgggtaaaattcaaaaactattggggaagtgcatacgcatactacttccatgatccatgattgtgatggtttccacatgcacaacagtaaaccatatgatcaagagaaacgcaattntgcggaaaattgtgtttataatggattcaagttaaacatcacaacaacatcagatggaggaatcagtctcagacgagtatattgggctgattcatg

SEQ ID NO: 303543 - DNA, 437 bp, Glycine max
  unsure (1)..(437): unsure at all n locations
agcttgtaaaatgatgagaagacagcccacaaaatttcaaacgaaaattcaaagtctaactatagaagctaaaaatgataagttaagacaaataagagaataatacttggaaaataaaaaacttttgacagaattacaatttttggaagaaggagacctcagtcggcctacggcgggctgccacgacatggaaaatttttttctaccccgaatacatatagagtaatagtgattctgataaccggagcaaaagttatggccgtttgcagttatgacaaaaatcaaatntgctacattntgggaactttcaaatctgaccaaactaagggctcannactattttcccacanaatatggatcacaagaagtgactacaaaaaaaaatcagccaaaaataacaactcttgctaccaaaacaaaaaatcccaattaattca

SEQ ID NO: 303544 - DNA, 431 bp, Glycine max
tatgcaatatacaattgtaggcattggtgttattttcagatgcagaaactgctacctccgcaaaggatgctttggatggaagaagcatacctaggtgacagttgtattatttgtctgacatggtatttagttcaactgtgatggacatattggctgtggatgtggtgcatatcctcagattggtcaactatagactgttgtaacttgtatattcacactctcactttggtttatttattatgtagtttatatgctgtttttgaaattgtaattatgaatcattgaatgtgtaaaatacggttagctatatcattccaactggaccaatcataagaataaatgtgttgagttcaagttttttctactaattagtagttattagcacattcattggctctgctgatatggttatataccttatgcattattat

SEQ ID NO: 303545 - DNA, 416 bp, Glycine max
  unsure (1)..(416): unsure at all n locations
agtttatttattttataataagagaacaatgacaattgaagagttgattcatgtttactttgatgagtctaatgttttttctccaagaaaggatattttagatgatattgcagaatctttagaacaaatgcacattcatagacaagattctaaaggaaaaagagaaggaagcaatgaagatcctccagtagatgtcaaagcaaataatgatcttccaagagaatggaaagcttanggagatcatccccttgacaacattattggtgatacctcanaaggggtaacaactagacactctctcaaatatttatccaataacatggcttttgtatctacgatcgaacctaanaatctanatgaagccataatagatgcaaatgggataatagctatgcaagaagaaactataccaattg

SEQ ID NO: 303546 - DNA, 431 bp, Glycine max
tttgttgatgcagtttaagaatcccaacgagctcttttgagtcattgaatcaagattcttgttggctattaaagctgtaacatgcggtctccactttctagataaactttgtaagattttatcaatgtgatcataattgtcataatgtctacctagagagtaaagctcgtttaggatgttttggaaacatccaaacatggtttggacatctattccttcttccaaactgaagagttcatacttacgcataagaaggctcaaccttttatgttttgtctcacaggacccttcgtaggtaatggcaaaggtgtcctacatctgtttggcacttctgtagccatcaaccttggaatattcctcttgtgataaagcacacaacatagcatttcttgctcgtgagttgagaagaaatctagaattatgatcatccg

SEQ ID NO: 303547 - DNA, 434 bp, Glycine max
agtttatttataaacaaaccctaaaccctaatttgtcaaatacccattaaacctcaatcagtcaagtaatcctaaacctttgtctttcaaatacccctaaaccataacaaccaaagtaaccctaaagtctaatttatcaaataaccataaaccctaattagttaagtacacataaaccctaattagtcaaatacacataaaccccaatttgtcaagtaaacctaattagttaaacacccataaaccccaatttttcatgtatcccatgaatcctaaattttcaaatacccctaaatagtgattaatcaagtaactctaaattgtctcataatcctaaaccctaattggtcaagtaacactaaagcttaaattttcacatacccataaaccctaattaagtcaaataaccctaaacctaattggtcaagtaacac

SEQ ID NO: 303548 - DNA, 420 bp, Glycine max
taaactaaattttagggcatgttaggcccatgctattgtgcaacacttgggcaacacttgagaatcccaatagcaagctattgtgttggactcttcccttcaaaaaagtaatttaatatcatgtgaatcattgacccacatatcagatattaatctgataagaacagatactacactcgatcttagccaaaaggccgagaaaggcatgagttgcaatgtcttgagaggctctctttataccgaaacatcaagtcattgttatcttttctaagcgatgtaggatttcaatcacagtttaacattggacattgatatatttcatgctcgttggtgcaaacaagggtgattttgatgaatgcattgaattaaaaagaaatcatgtcgagtggttgtgagacggcatgttcttgttctgtgttg

SEQ ID NO: 303549 - DNA, 400 bp, Glycine max
  unsure (1)..(400): unsure at all n locations
agtcttggngaggaagaaaaaagtgctgtgacctcattttatagcaagataaccattcaactctttgataaactatttttgtcccagtagtatgttgttagtgtcagatgtgcttggtgtagttaaataaaattctagtcttcttgattttctgtttttcatgggtattttagtgagttgcttatattagatattgaatagtggtttcagctgggtgtgaattcaaaaaatagagctgggtctccattcagttgaaaccagagtctaccctgtgaaaaatcttcaagtctcatattactatgtgttttctattacaaaaatgtattcatgctcatctgattaagaattcagttaataaaatanaaataaaaatcttctttgaagcagtgattgtataatg

SEQ ID NO: 303550 - DNA, 422 bp, Glycine max
  unsure (1)..(422): unsure at all n locations
tgtccctgacaccaaaaattgctacaactttataattatgattaaaccaaaggtaataattaatagggtaaaatacgttttcagtccccaactcccggtacttttactagttttagtcctcaaacttcaactttgatcaatttggtctcctgaactttactaacggttaaaaccgtgggacaaaacccactgttttcttctaagagggaccgaattaatcaaagttaaaatacggagtctaataccaacttttaccgaaaataatacaggcactaaaaacatattttaactcaagtaacaagtaaccatagaatgaacgagacaagatacttgtgagcgcgggcatcgacgccgcggtttttgacggagaatttgtctttgggggcgattntgttcttggcgcgttggtactcggcatcggg

SEQ ID NO: 303551 - DNA, 416 bp, Glycine max
agcttgttcgcacatcgtttgcgtgtatgatatccactcgacaaggtttgaagtagaggagaccttcaatcctataacgcaacgtggcggacgaaagtgggcagttaacttgaatggccattattgtcaatgcggaaggtattctgcacttcactatccatgttcacacattattgcagtttgtggttacgtgagcatgaactactaccaatatatagatgttgtttacacgaatgagaacatcttataagcatactccgcacagtggtggcctcttgggaatgaagcggcaattcctccttctgatgaggcatggacactaatccctgacccaactacaattcgtgcgaaaggtcggccaaaatcaacaaggataaggaatgggatggattgtgtcgaaccatctgaccaccgac

SEQ ID NO: 303552 - DNA, 421 bp, Glycine max
  unsure (1)..(421): unsure at all n locations
ntagccttaggttgttccatgttgctgctccccctatctctaacaataaattcaaccattgctaccaacaacttcgttatagtagccactgccacacacatacactcttatagcaaagttaggacattaaaaaaaattgaaacccaaagaatgtatcaatattaattcaaactctttcacttggataacttaatcaaaacatttgacatgtgcattatgcagaaagcgatttacaacagaatacaatgaagatccaaaaatctgacttcctttttgggtacagggaatcatcgttaattaacttggatccattctgaaataaggaaagagatgtaatgataagtaaactntaactactaataactacatcataacatagatttcatcagtaagaaanagccaactgatccttgaattccat

SEQ ID NO: 303553 - DNA, 382 bp, Glycine max
agcttgtgtttgtgagcacttcttgtccaatgctaaccattttcctcttccctccagaaacccacccctctaaccagtggccctccaatgatgttgtccttgcacttggttaaaccaagctgagccatcacaatttttgaatgcagaattttctccttcgtggtgaaactatttggcaatttgagaggggaagtgagcactagagtttcaaccaatcaagtggggatagagaacataatcttgtgtgacaaaacctctgctcctcttcattgcatttgagaaggctctgccattgtatgttatgctttcatggaatttccctctgataaaaataacaaaaaacatcagactcattttggcagaaccacaaaaatattacaat

SEQ ID NO: 303554 - DNA, 193 bp, Glycine max
tctgagcatggaaatcacatgatggctcatatctttgcttatggccttaaagcccgctcggctggtacaggcactcacttggataaaagacttgctatcaaaagaccatcacttatttgaattctgaaggcttataccaaacttttgggtgctgacgatgtgaacaaatatagcagcgttgcacttttttact

SEQ ID NO: 303555 - DNA, 366 bp, Glycine max
agctttgaatgttctatctacatatgatgtaacttgaaatcaaggaatattatttatttttattaacttttctattcaatctcatgttggagatacaactattgtcaacggtggagaacatctatttagtagtacattgttctgggatttgtcaacatcagcccttacgagttagaactgacttatgcaactaaaatcagaatacttttgttgaactcattaattatatatataatgaaggccttatggcatttggggtattaccatgactgggtattggctatttattgcttggttggccgatcttataaatgataggtagaagtctcatcttcgtgtgcccaaattgtgtatgtggcattctca

SEQ ID NO: 303556 - DNA, 412 bp, Glycine max
  unsure (1)..(412): unsure at all n locations
nttagtatgtttaagattntatttcaagacaattgataatgctatatctgaaaataataaatcactttggttaattaacatgaaaaatgtatcgatatggtcaaagtgaaaaattacatttttaaagatgcgtttttcactttaaaacgattgaaccctttctttctttctttcttttttgttaaagatgacagattcaacggccgaaacaatagacataaactttaaaacaattatataattatgattgttttggatatatcaagctcaaacaatttgtagtggcttttcttttatagaagacccttccaaaagagaaacaaaggatctacatatgtcaaagttaagttggagaagaagtttactttcccaaattgggggtaaagatttagtatatgtgaccgacactatg

SEQ ID NO: 303557 - DNA, 343 bp, Glycine max
  unsure (1)..(343): unsure at all n locations
agcttgtagccatcagaagagaatgagcatgtgattagaagtatgactganaatgttagttagtttgtcagattgattgtgaaggaatgcattaaccgtatcccggtgagagtgtgatccttanattntgagaganacgactatcatttagtactgattnttgcgtgaatctttcaagtatggactagatgcatganattgaggatgatgaaggccatgtttgattgtgatagccacttagccaaaaagctgaccatgtgcttgaatgaattatcccttgtacccaggttgagttgaatgaattattgatttgatgaaccctgagcctatatagtgttatctc

SEQ ID NO: 303558 - DNA, 408 bp, Glycine max
tcttagtttcagatgatgcacatgagtttgtagctacctcatgcactcctctaatgactatagcatcatttttggcgctaaactgttgggagttggaagccatcttctcaattaaattcctggcttcagcaggggtcatgtctccaagggctccaccactggcagcatctatcatacttctctccatgttattgagtccttcataaaaatattggagaagaagctgctcacaaatctggtggtgaaggcaactggtgcataattttttaaatctctcccaatattcatataggctttctccactgagttgcctaatgcctaaaatatcctttctgatggccgtggtcctagaagcacggaaaagtttttctaagaatactctcttgaggcatcccagctcgtgatgga

SEQ ID NO: 303559 - DNA, 441 bp, Glycine max
  unsure (1)..(441): unsure at all n locations
agcttcaacatcagaccacttccagggtgctggaactacttcacatggacttgatggggcctatgcaagttgaaagccttggaggaaagaggtatgcctatgttgttgtggatgatttctccagatttacctgngtcaactttatcagagagaaatcagacacctttgaagtattcaaagagttgagtctaagacttcaaagagaaaaagactgtgtcatcaagagaattaggagtgaccatggcagagagtttgaaaacagcaagtttactgaattctgcacatctgaaggcatcactcatgagttctctgcagccattacaccacaacaaaatggcatagttganaggaaaaataggactttgcangaagctgctanggtcatgcttcatgccanagaacttccctataatctctgggctgaagccatgaacacagcat

SEQ ID NO: 303560 - DNA, 430 bp, Glycine max
tgtaatcgattacacatatactgtaatcgattaccagagcagattttcagaaaatattctcaacagtcacatcttttatgtggttcttgaatggctatcaaaggcctatatatatgtgacttaagacacgaatttgctaagagtttttcagaacaaaaaggtcttatcctcttaaaaagcaaatcgttttatcctcttacaaattccttggccaaattacttgtgattcaataaggaattatttgagtactcaaattgttcaatctatctctttcaagagagatttcttcttctcttcttcttcattctgaaaagggattaagagaccgagggtctcttgttgtgaaagaattctaaacacaaaggaagggttgtccttgtgtgtttagaacttgtaaaaggaatttacaagatagtggaactctcaagc

SEQ ID NO: 303561 - DNA, 421 bp, Glycine max
  unsure (1)..(421): unsure at all n locations
agcttgtggtgtgtgatggttccttcaaggagattttctgctttgatagtcttaatgtggatgaggctggactcctgttacagctcanagtcttatgcttggactcccttccagagcttgtttccattgggttagagaactcttggattcagcccttactgggaaatctagaaaccttggaagtaataggttgttctagtttaaaagacttgttcacatcctcaacagcaagaagtttgactcgactcanaagaatggagataaaaaggtgtgattcaattgaagagatagtctctaaggagggggatgaatcacatgagaatgaaataatatttccgcaactcaattgtttgaaacttgaatatttacgaaagctgagaagcttctataaaggaagtttattaagtttcccatcattgga

SEQ ID NO: 303562 - DNA, 377 bp, Glycine max
atactcaagctgctgagctctgataattctttaagtttcaaacaattgagatgctgaaatattatctcattctcgtgattcatccccttccttagacactatctcttcaatttaatcacaccaacttatctcaattgttttgagttgacccaaacttttgggtgttgaggatgtgaacaaatatagcagtgttgcaattttttacttccaaaaatgtcaaattcgagaagggcactgtgcatggttccaaattaggcaacactccgcttttatgaaaattcgcagcattattcttcgaataatacaccacaacctattcataaatgctctcattctatttcatccccttggttaaagatgatggaacacaagactta

SEQ ID NO: 303563 - DNA, 325 bp, Glycine max
  unsure (1)..(325): unsure at all n locations
agcttggactcatgagtggtaagttgaggtctaagtggattggtccttttgttgttactaatgtttttccttatggtacagttgagatcaaaagtgactccacaaacaagagtttcaaggtcaatggacaccaacttaagccattcctcacaaacccttctttagtggacgtagtggtggaagagacttccttactccaccctactattcctccaccatgacttanggagtttttctttgcctatctccttctttacttttattacantttgccgattctatttgatnggttaattgcttttaatcttttaattacgctacattg

SEQ ID NO: 303564 - DNA, 405 bp, Glycine max
tgtaggccttggatcttcttcatcaatggagtcctttgcttcttgaagatcaatggcagcagaatggagaaggaggaaagctgattggagacgccacttcaaggagaagatgagtcaagaacaagctcacaaccataggaagccatggataagagctttaaggtagaagatgagtggagggagaaggagagaaggaacacaaaattttatgtcccaaatgaggtcagaactttgaagtgtaattcccaaatgatcaaagttgaaaaactacacacataagacctctatttatagcttaagtgtcacacaaaattggagggaaatttgaattctattcaaatttcacttgaatttgaatttgaatttgtggagccaaatttggagccaaaatttcactaattatga

SEQ ID NO: 303565 - DNA, 423 bp, Glycine max
  unsure (1)..(423): unsure at all n locations
agcttaattctattctctntnttttttttaattntgacatctacgaaattgtgatgtcaaaatatttgtaaatggaaaatcacttatcacaaatgtatgaggactaaaaatatatacaattccatgtaatattttaaaaaatattaatataaatattgtacgtatacagctcaatgactcgactaatacaacctgaatttatttgaattaacaacaaatttatttgactcaactaatacaacctcaatttcaaaagaccaatctaaactcactccgcagcaaaacaaataacatgattcccacgcatatgtgatagcgcttgtgttctcaccaatccaccaaatgtgctcccaccacgtcacttcctggcatgtaatagaaatcatgaaaatgtttaanatcattccgtgtaaaataataaaa

SEQ ID NO: 303566 - DNA, 395 bp, Glycine max
  unsure (1)..(395): unsure at all n locations
tattattgtttggagtttaaaacctgaaactcatgagaggtagtaagagaagaggaagcatgcgatgatcatgatgatgggccttaccgtgggccttggactcatcgtgggccccaccaacggagtacctcgcgtaacacttcccgagaaacatgtcaccgtaatccgctgtgccgcaatcgctcttcaggcgcgagatcgcctccgccacgcagtcctggcactccccgtagctcaagtcgccggtgcactgcgccacgccgtgtaccccaccggacccaccgacgcgaaagttcccaccggcggcggcgagtccggcgagcacggcgtcgcggctccccatggcgtcggngttgtacccgaccgacggcccgcacttcttcagcaccaccgtc

SEQ ID NO: 303567 - DNA, 426 bp, Glycine max
  unsure (1)..(426): unsure at all n locations
ttctntgacttttaataaattntctttagtagatcttagttatttttttaaacggtggcttcagttttttatacatttttttctttttatccttaaacatttatcaaattttctgattattttaaaaataaattatgattctttctgttattttatattttttaataatttccacaactaataatttaataaaaaattacattttcaatttccagcttaactttctcacttctagctaattttataaaaaaaataacaagaatgaaactgaggacaatgaaaaagtcccgtgtaaccaatcaatttgaataattaattaaagaattgaattaatagaaaattgaagaatttaaataactgtattcatttacaagctacaacagtaaaaaagaatgaacaccatttttgcgaatgactcacttttct

SEQ ID NO: 303568 - DNA, 404 bp, Glycine max
  unsure (1)..(404): unsure at all n locations
gggacagaatctcccatgctactatgaatatctccaccttattaagcaacacctgccacttgagcaaaattggtcctagtgtaaaacacctaacattagaactttgggtctaccaatatttattattaattttttaaagtaaaaaatatcacacatgttaattaaaagaccttacatattattattctctttaaagtaaaaaaatatattttaatttttattctacgtgtcattttctattgcaccgacacttcacctgagagtacagatttcactacgagaatagctccaagtatttgcattgtagcatcactaacaacatcgtgtccatttggtgcagcacacaagtattcacaactattcttcatgtccggaattagtgatctgatcaanatactaatcaa

SEQ ID NO: 303569 - DNA, 273 bp, Glycine max
agctctatctttaatcaaccacacatggcccgagccataatcgacgacaaaaaatgaatcacaagccaatgaagccacccttctggacacacacgcctgattcatgagcatatcacacattcacacgattcaacgaagagtgagagtgtgagtcagaggttctacctatcttattaccattgataagagagccttgctccacttatacattgattgtctgcctacaaatacactctccatgctctgaatggatgcacatgtttaataatctta

SEQ ID NO: 303570 - DNA, 483 bp, Glycine max
  unsure (1)..(483): unsure at all n locations
tcctttgaccccttagaancgctatagattccgtgacactatagaatgctctagctcgtacgcgcggtatcttcgacacaaaggattactccgtttcctgcagataaaagggctctgagcatgtcgacctatgaaagtctattaactaaacgtccgtgtggaaaagaatgagcggcaaccatttctcgagagcttccgacgattagattgcaaccttttcgtctaataagacgctcgagcctaagatgccaattgaaccctttttacaacttgaacttctcctaacttctgatgtttattttctaaaccctcaacatattatacgcccgccatctatacccggattgtgcctttagtgcgacacactaattgctgtgaaattgaagtccaatggcgtcattcttgactcctacattgggccatgagaccactctctgacttgacttcccttattattatagggattttataatggtcagcccg

SEQ ID NO: 303571 - DNA, 407 bp, Glycine max
  unsure (1)..(407): unsure at all n locations
agcttgtgcaaatcaaatcactcctacatttcatctctagcatgcatcttctttctttacccactcctcacgtttggttttttagggaaaaacaccataactaaacgcgccgcaagggatccctatcgcaccagatccaaatctagaacgatgggtgatcaagaggagacgcaggaacagatgaaagccgacatgtcggctctgaaagaacaaatggcctccatgatggaggccatgttaagtatgaagcagctcatagagaagaacgcggccaccgccgccgctgccagttcggctgccgaagcagacccgactctcttggcaactacgcaccatcctccctcanacataataggacggngaagggacacactggggcacgatggcagccctcacctgggatacaa

SEQ ID NO: 303572 - DNA, 416 bp, Glycine max
tcagcttgagggtagtgttgaaaatcagaattaatattctgattctattaataattgtaatttatagggacattatatttgatttagaggaaacaaaatatcctctatttatgtaccactaatgtaattatcctatataaacaagcatttgttgtgtactctgatacacggttttcactctagtatccctctttattttctctcattttacagatatgatttgatcacgataaatagggaaatttctcagctgataattaaggattatacacattattagtggttatgattccttatattgtactcttgattcattataaatcagaataacatgtgcaacacaactacataattacagtaaataacattgttatattgagtaatattctgagtgctgaccacaactacataagtgc

SEQ ID NO: 303573 - DNA, 149 bp, Glycine max
agcttccatcatagtggaatcagagcacaagaacttcaagtaggtgcttcttaaaccctcattaaatttttttctttaacctctcttccattggtggttcctcatttttcttcatggatctcctcacatggcctggtctaaatggtggt

SEQ ID NO: 303574 - DNA, 362 bp, Glycine max
tgaatcggacctcagtgtgaaaagttatgaccatttgaatttctcgagagctttcgttgttcaatgtcgagcatctcgacatattatgcgctcgaatcagacatccgtgtgaaaagttatgaccatttgaatttctcgagagcttccgatgtttaatttcgagcctctcgacatattatgcgcccgaatcggacatccgtgtgaaaagttatgaacatttgaatttctcgagagcttccgatgttgaatttcgagcctctcgacatattatgcgcccgaatcggacatccgtgtgaaaagttatgaccatttgaatttctcgagagcttccgatgtttaatttcgagcgactcgatatatta

SEQ ID NO: 303575 - DNA, 418 bp, Glycine max
  unsure (1)..(418): unsure at all n locations
agcttgtggttatgaaatttacgatcctcccactcttcggtcctcttcttcagctcgatccaaggacaaggtttttctcttcttttttaaattttgttctctctttgtttcttgcttctcaaaagaatatttaaaaaggagacttgctattttgtttctttgttttaagtttcacattatggtgataatttttttatcttctgaaaccttcattcaggttgtggttttgagggtgtcattgcactgcaaggcctgcgaagganaagttagaaagcatatttcaaaaatggaaggtgagtctgcttaatcaatacatagtcttggagtctcaaaatgagagtctggatataattagataaacattggcagtaataatactaattctcatgttcttgagcattntttntaatctttntct

SEQ ID NO: 303576 - DNA, 443 bp, Glycine max
  unsure (1)..(443): unsure at all n locations
acactactagaaactctagcgtactctggcactcaagacttgtatagatctctctctctctcttcaccttatattggtttttttacagaaaatatgaaagaataatgctctgtggttaatctctacaattttctacaaaactactatttgtctttatttacaagttgtaagatttaactttgtactgctctcagttagctccgccactccttgtaccaaagttaattggtttttaatagtataatttagtattttttggctgcgaaaaaaaatttgtacgatttctgcattcctattgacataatccgatttggttaaacttattgattgaaataaatatttattggaatcaaataggtagtgcatgcatttgtatgtgagttggacagatcatgcccaaancaatcnatattggttttattntatcttctggtatcaaaatc

SEQ ID NO: 303577 - DNA, 394 bp, Glycine max
  unsure (1)..(394): unsure at all n locations
agctgtgtaagatgttttaaggagttaatcctcagccaaacctgtgcaacctcatttaaagaattcttttatcatcctatggactaagttcattcttcttgaatntcttgattcttgacttggatcaaacttgaatagcgttcatctttggcatcatcaaaacttcatataacatatgcttctacaattaaaggtagtgtcttggtggggtaacatctctaagcaatctccacatgaaatgcttaacttttggagggatgtgaagcttcccaagaagattccaattacctgagattttgaattggtcacgagccaaacattgcttcgtaagatgatatngttgtcttacagagtaatttgcatgtttgctgattntctaagtaagtacgtcatc

SEQ ID NO: 303578 - DNA, 438 bp, Glycine max
  unsure (1)..(438): unsure at all n locations
ntgngactattcacacaatttaacaagaaacaatgaaggatcaactgtgaaaattaattgcattcccatacctagatctccttctaaattccaccgaatttatatatgtttaaatgcatggaagcaaggattcaagactagctgtggatcttttattggtcttgatggttgttttttgaaaggctactatggtgatcatttgcttgcagcagcgggacaagatgcaaacaatgcattttttgtgattgcttatgcggtagtaaatgttgaagataaagataactggaagtggttcctcacattgttacatgaagaccttggagactgcaagcaatatggctgaaattttatgttagacatccaaaaagtgcaattcaattgttttgctttgatcaattcatatatagaatgttgtaattntgattgcctgcatgcata

SEQ ID NO: 303579 - DNA, 423 bp, Glycine max
  unsure (1)..(423): unsure at all n locations
agctctanaatttgaattataacgttcaaaaactgctggtaatcgattaccatatatgtgtaatcgattacacagtgcanattttgaattcaaattttaatagctgttgtaaatcagttttggccattggtaatcgattacatcctctggtaatcgattaccagagagtaaatctcttgaaaaagactttntttaacttanatttcttggccaaaccttttgctacttcaattggaattcccttcctatttaatgtaatcttcctaagactctagatactggcttgatcatccatcttgaatatctttgatttctttgtcttgaataanactttgagaaacatgtaatcctttggcatcatcanaacattaagcttgtcaccaacaaaagtctgaagacccatcgaacttgtcaaaagctttc

SEQ ID NO: 303580 - DNA, 431 bp, Glycine max
  unsure (1)..(431): unsure at all n locations
tcggaagaaagtgatgaagtacaagccctanaggcagagcttgaaagagcctgngtagtcgaagagaagttcaagtccatagccatcaaagtctgaaaaaagtatgatgaactaagggatgtcaatatggccaccgatgaagccttggaatgagaaaccaagaaggcccgaaaggaagaacacgaccaaagcaaagttttgaggggctttatagggcagcaatagtgagctcaagctccgaagaggtgaaaggaatcatcacgggtcaaaggcatgatcttgaaggacgagctaaaggtttgccttatgtcgaaaagaaatttgttccaacagttaagcgagactgaagggaatatgtgggccatcatcgataagtgcaaagagaagctaaatctagcggcgactcacgagcaaaggctagaggatgagta

SEQ ID NO: 303581 - DNA, 468 bp, Glycine max
cactcgacccgggatccttaagcacctgcagctgcagcttgctctatagtgcctggacgtttgtatgttggaagctgtaatcagcgagggatggaaaataaaagtgtaaataaattctaagtatgacaatagattaccttataatgccaacaattttgtctcaagtgactcaaatcactaaatggacatagttagtggacatccaaaagtccatacttattactaagaaacaaattgttatgatactttttttactatcggattatgaaaatttcaagattctaaagttcaatatgtcatataactcacaactaacataaggatgtcttccgtcttccctattactatattagtagtaccttatgatgattgtagcaaggtgaagctgatggaagtcgatctacatctttgccttcaattggttgccaaagaggaacatcacatgcaacctgtgtaacaaatagacat

SEQ ID NO: 303582 - DNA, 433 bp, Glycine max
  unsure (1)..(433): unsure at all n locations
tgcgcctactaggattggtctagtatagtggtggaagaatttggatggttagcacaattttttaagttcaaattaatcttgttgctgttattatatactaaaataattattctaaccatgcttgcattggttcaaaactcaaaggcattgtttgcgttaaagaaaaaaaaatacattgctttgtggtataatataatcaactatatattgctgccatgtttgaatcagccttgatttcaattaatctttcggctgacaaagcaaaacgcttatactgcatgccaaatattttaatttgctgtttatgccaatgtacttaattgcgtattgtgataatagnttgttttcctgtgtcaatatttaatcagtatcattctaaaaagttataaaaaaatcgattaatataacgaataaggagaaattacttaattat

SEQ ID NO: 303583 - DNA, 428 bp, Glycine max
  unsure (1)..(428): unsure at all n locations
ttgcttagtgtacttattggtgagagaagcttggctgttggatagatgagcgattgcgtcctccagtctatccgtcgtagtctttttggttgcatggtcaaccatggcgatggtgacggcagcatgttggactagtgttagcaacgaggaagagaagatgattgccttagttcaaggcaaggcacctcctgcgaatgggttgatcgaaacaagtattttgcatgcttttattcatgttcatgcagtatcttatatactgcgagttattacattcataacaacccttaaccgatttaactaactctagcagagtaactaacttctaatagcctcaactaactacacgtgctattanttaactacctacaggtgctctttggctacatcgtgcgtgcactattagaaaatatattntntacattggttat

SEQ ID NO: 303584 - DNA, 380 bp, Glycine max
cgattggggatagctcttgatgaccagccttgcagcaattcagattgtctatatcttcatgagattggctctcaagaggatagtttcacaaaatatgaaataatttcagcatacactatgtatttttctaatcttaaatgagctttcatgcaaagcctgttatgattctgttgaaagatagaaactgttgaatgtttcttgtcctggctgcatgctagtcctggatgcaaagctgaggctaaaatattactttcatgcaattggcaaactttttttttcctatagttagttaaaggctgcatgtattttttaaattgattcacatgggttttgttggcagttgatacatgattggaccattcattttccctctattctat

SEQ ID NO: 303585 - DNA, 410 bp, Glycine max
  unsure (1)..(410): unsure at all n locations
agcttccatcacccgtggtagtcctcatttgtttcgtgtacttttattctcgtttcatttactttccgtacccccttttgacgtgcttcaatcatttacttaagtcattttctcgcctaatcaaaaaataaaataaatttctaccgatcatttaatttgtaatatccgttaatttttgttaaaatgaaatccgatcgttcggtcacgccgtaaccacgttggaaaccaaaaagaggtaaaataataatataataatcaaaaaatattntttagtaaaataaagcaaaaaaaatcaattggacttttctctttgagatttctctttcttaattgaattgactaataactaaagtgaaactaaggctaanatcaactcgcaaagtcaagctcgtccgcaaaaagtactaaaa

SEQ ID NO: 303586 - DNA, 420 bp, Glycine max
ctgagaactagaagatatagaaagagtacttctttacatgataatggtttattaaagaagattagaacagaataatgcagcgttttagaattctaacttaaaaaagaggtgagattttttagatcgatccttaaaagccagcgaatacatcagtgttacattcgttactgacttactgatcataaattagaaagctattagattaaaatatatttttgttcatataaattttaaaatatttgagattcttcatataaaaatttcgaggtattttttttcctctaccaaattctaaactgttactttggtccttggtccggggttagatttccaacatatgtgcttgatggttgtgaacctaagccaatccattagtcaattgggtgttgacaagagctcaaagactctcaccctacaaaa

SEQ ID NO: 303587 - DNA, 307 bp, Glycine max
  unsure (1)..(307): unsure at all n locations
tgcttgctaacccatggaagctcctaatatctcccacactctatggtgtgggccattcttggatggccttgattntctcaaggtccacttggaccccatttctaccaactacaaaacctaagaaaactatattatctacacaaaaggtacacttctctatatttgcatagagggtgtacttcctaaagactgaaagaacttgcctgagatgtcctaagtgatcatctaagctcctactgtacactagaatatcatcaaaataaacaactacaaatctacctatgaaatcccttaagacatgatgcat

SEQ ID NO: 303588 - DNA, 249 bp, Glycine max
tgcttgtggagcttctatggaggctggatttttgagcttcaatgaggtccttcaatggtgattttccaccatggagatgtagcggaagacaaaggagaaaaggtgagaggaggtgccatccactagggaataagccatggaagaaagagcttcgccatcaagagagtgccttggataacaagcttggagagggtgcttcaatgaaggaaaagaaagagagagagagaaagatagagggggggggggggg

SEQ ID NO: 303589 - DNA, 310 bp, Glycine max
  unsure (1)..(310): unsure at all n locations
agcttataataatggtgaatgacaatgtaaactcctagggggggggggggnaanccaacacccaacccacctttgattacacaatttaatagcagtcaaaatcatctttggccttcgatcatcaattacttactctgtgattccattaccagagagcttatctctagaaaaagacttttattaactaaaatatattgttcatacctttagctactccaattggacttcccttactatataatgtaatcttgctaagactctatatactgcacttatcatgcctcctgaatatctataatttctttgtctt

SEQ ID NO: 303590 - DNA, 420 bp, Glycine max
  unsure (1)..(420): unsure at all n locations
ntgaagaaacaagatacaaatcatctatgtgaatccttctttcttgtaaagctttctataaattcttataaagatacaaagttctcaaaacaccttgcataccttgagagaaaagactaaaagtgctaagtgatatatatccatttgttaaaagatcatactctagttagtgagcaatcttccaacaaatcttgttggtttgtttagagtcaacaaggacttggtgggataaagaatattgggtttaagtcaagcctaggataaagcttgcaagtgtatgtaagagctagaagtaacaatgaacaatacttgtaactttgataagttagtaaaaacttggtggttgctaagaattggatgcaatcttgaggttgagacaaactaatataaatcatttgtgtgctatcttacttaattgac

SEQ ID NO: 303591 - DNA, 407 bp, Glycine max
  unsure (1)..(407): unsure at all n locations
agcttctatataagctgaacctttntatcaataaacacaagttgagttttattcagaaaattagagtttatctcttttatcttagtgagagtgattctcctaaattcttgagtgattcaagaacaccctggctgtatcaaaggactttcacaacctttgtgtgttgcccttgcaggaaagagtgattgtttccttcctttcatcttcacccttgttatttgaaaccacaattccagaaaatccacctctgcccagaattatctcgtggccataactcctgttttacgcactcaaattaagtgattcttgagcctaaattgaatttcaaaacaagacctttttcacctcgtttagaatcacctcatttggagccctgtagcttcagttattgccatttctatatttct

SEQ ID NO: 303592 - DNA, 434 bp, Glycine max
  unsure (1)..(434): unsure at all n locations
ntacaacagattntagtaatgacccactaacctagaattaaaataacttaatgccattaaccttgggaattaaaaaaaaaacttaatggctgagtgtaactaaaattgtggcaaccaaaagtcacccccaacagccaacaagtcagccaccatttggtctcccaaaaggctgatgcctaggttgccaattgggcccttattacaacttgaactaaacctactaaaaagcccttttagttgattaacccaaaacatatttttggtcagccaactttacaaggattgggccattatttagacaaactaaacactctaaaattgagacaaagtggtgtcatttagtccttctccatttgggccatgatacaactcacaaccttggacttttctccttgaaacttgggcttgtattcaaatagtatggacaacacttg

SEQ ID NO: 303593 - DNA, 421 bp, Glycine max
  unsure (1)..(421): unsure at all n locations
agcttagctgtagcatttagtaaaaaaaaaaaaagttggggacagtgtgtttcttttatctgtcaactttctcccgttttctcaattaaaatgggtttaatgatgacccacgttatggaaacaaattattgttctcacataaattttgtatccattcgcttaatcaacaacatcatcgctaaagagcttanattggtgggcatcaagaaccaatttccttatagaagagaatgcgcccattattccaacacccgtgaagaccaccataattgaggtgttaatccaataagtgaaggatgattttggaggcttgtatgtcatgttgtacataagcataggcagaacgaaatccanagggatgaaaccaatggcaccaaccacaccgttgatgtctccaaaaaatggcagcatagctgccaca

SEQ ID NO: 303594 - DNA, 383 bp, Glycine max
tatattacatactatcatgtcaatgttaaacaaggcatttactgttgctttgaaagagcagatcaccatatttaaagttgtatcaattggtatttagaaaaattactgataaaagagttaccaaagttgcaacaccatgaccagccagtgctccagctatgactccaaggggagaagaagctgctgcaatggctgaatagtatggaaaaaacagttcatgataaaggtggtgagttcagtgcatgacaagaagcaagatagcatgtcttggtatttgaaacaaatgaaaagtcaacaagaaaattatataaactgaaactgtattgatccaaatcaattggcactcaactcttttaacgccaagcatataaattagcttcaag

SEQ ID NO: 303595 - DNA, 417 bp, Glycine max
  unsure (1)..(417): unsure at all n locations
agcttacaacattggccaattaagaatcccatataagacagatctggcaacaacgtagtggggttgggtttggagggctccacttgtattaaatttcgtcttgatcttttccatccatacttcatgactctttcatccacatgtttgaatgctcatgacaaattaagattggtggataaccaacaaaacacccttgttattatcaccaattcatcatcaccatcgttcacacaaaacttgtgtttagtgagatcaatttgtagcacagctcattggccccctattagcttaaattttgtatagaaacaaagaaataattntcaaacaataaaacaacttttgtcttctttcattttttaagaatattntcaaatgtgccaaatagttttttttaaaaggataagatgagtaaaaagt

SEQ ID NO: 303596 - DNA, 419 bp, Glycine max
  unsure (1)..(419): unsure at all n locations
tgtagaatggctagacatgatacatgtcagggcttggtttggttcaaggataaaagggatgccccacattatttccatgacacaaatgcaaaaatgacgatttggaaattttatgcaaaattggttatgcatagcanntatgcggacactcaagtgtcaaatttttatggtcatgtgatgctagggctcaggattcatttcctctattttagtcaacccaacgtttccaaaatatgttcttttatcaatttgtgcattcatccgagtccattttgggcgtctgggaaaatcttcacagcattcacccttcaggtgtatacacattnnnnccgcggctagttgtgagcagtgaaggggtgnnagaaaagttggaagtcatctcttttcaaaagcatgttggcttttcagcttgacaactt

SEQ ID NO: 303597 - DNA, 437 bp, Glycine max
agcttcctttctcccttcttctgaccctccattatcacaaccaatgtcactcaccatatgaagcttccatggttatcttccatggttgtcactcaccatacgaagtttccatggctgcctaccacccacactactctcggaaccctccactaccccccacaacaatcaccacaccatctggaattttcgtccgacaccaaggaccgcctcgaggccgtcctggctaaacttgatgttgctacacgccaccaggacacccgactggacgctcttctcctatgactacctcggcaacccgaccacctctaccctcctcagtctccatgcttcgtgcccataccaccaagtctcgcaccattactgcctctgccgcggacttcgccactgactccaccgctgtctccgccgttcgagctgactccatcacccatgcttat

SEQ ID NO: 303598 - DNA, 409 bp, Glycine max
  unsure (1)..(409): unsure at all n locations
tattctgagcatgattcctcctaatttccatgcccaaaatctttttagttgctcccatatctttcatctcaaattcactattaaaaagtgacttcagtttccgaatttcaaacttgtgtcaagatactatgggcatgtcgtccacatagagaagtagataaatgtatgcaccatccttcaccttactatgataaacacatgaatcatatggacttttattgtacccatgagagataattaactaatcgaatctcttgtaccattgtcttggagattgcttcaatccataaagagacctttacaacctacaaataaaatcttcctttccttgcacttcaaaaccttttggttgtttcataaaaatttcttcctcccactattccatggagaaaangttgtttcacatcaa

SEQ ID NO: 303599 - DNA, 396 bp, Glycine max
  unsure (1)..(396): unsure at all n locations
agctntaaatgtgcttcatcttggtcattggcaagaatcgcgttcatatcacattgaaatgaggagtgaagaattcctaacagagttgagggatcaaaagtatttgaagtagtcttcgagggatatcaagaatatctgagttgccaccctctattgctcaacttgagaacctacaaattcttgatcttggaaacatttcataatgatattttatcaatgaacattctcacacatatgattctatctcaacattacttgttggagagaatcccacacgggattgagaagctcattaatctattcaacccccacccctcttctatattcccagttattacaacactntcaaatgctntangtacttgagacacaatcaccatacccaactcatccata

SEQ ID NO: 303600 - DNA, 415 bp, Glycine max
  unsure (1)..(415): unsure at all n locations
tgcgcgaatcacanaactcctacatggcatctctagcatgcattttctttctttacccacccctcacgttgggttttttagggaaaaacaccataactaaacgcgccgcaagggatccctatcgcaccagatccaaatctagaacgatgggtgatcaagaggagacgcacgaacagatgaaagccgacatgtcggctctgaaagaacaaatggcctccatgatggaggccatgttaagtatgaagcagctcatacagaagaacgcggccaccgccgccgctgtcagttcggctgtcgaagcagactcgactctcttggcaactacgcaccatcctccctcaaacatagtaggacggggaagggacacactggggcacgatggcagccctcacctgtgatacaaccgagcggctta

SEQ ID NO: 303601 - DNA, 437 bp, Glycine max
  unsure (1)..(437): unsure at all n locations
agctnttactgtccttgtgttaaatgtttgaatgagagagaactagaagttgagaatatatgagcccatcttttttgtgatggtttttgcaagagttatacaacatgaacatggcatcgtgaatattttgacaaggaaagtgtgtcccaaacaaaggaagttgatgtagatatggatgatcatctagagaatatgattcgtgatattggatcaaagtcttttcagcaagcacatgtgtatgatactttgaaaagtgatgtggaaatccctttgtatctagggtgcactagtttcacaaggttatcaacaatgttgaaattggttaatcttaagacgaanaatgagtggattaataaaagcttcactgaattacttaagttactggaaaaatgcttctgaaaaataacacattgccaagctatcactgtgaggaaaaa

SEQ ID NO: 303602 - DNA, 439 bp, Glycine max
  unsure (1)..(439): unsure at all n locations
tgtcccaaggattcatatcctttaaccccaacatagataggcttgtggatggagtttttgaatgcagtttgataccataaggaatcataacctccaattaaacttagaaaaatgatttttcaaagtacatgccgagaagttcttaggttttatgttgacaaagaggggaattgagggtaacccaaataaatgcaaggccatcatgaaaatgagaattccaagaacggtcaaagaagtgaacaactcatagggaagatcatgtccctgtcttggttcttatcaaaatcgacagagaaggaactccctctgcttaagtgatttcggaagaacaagcacttccaatgggtgctagattgtgagaatgccttcaaacaattcaaggaattcctcacaacactacccattntaacaaggccgaaatcgaaaggctctatacttg

SEQ ID NO: 303603 - DNA, 442 bp, Glycine max
  unsure (1)..(442): unsure at all n locations
agcttatagtcattacttgttaagaaccataagccagagtcgattgttcctttgataaagtgaagaatttgttttgcagccttgaaatgagtagtggttagagtctcgatgtattggctgatgagtactccagtagcatatataatgtttggtcttgtgtgtcaaatatcataaactacccaccaaactcttgaaatctatagcatccagttttcttgcttcgtcgaactttgataacttcattntgcactccatcagtgttccaattggcttgcatctatccatcttgaatntattaagcatcttctttgcgtagctttgcagtgaaatgaagatttcatcttctttctgctntacctcaatggcaagatagtatgacatttttccgatatcggtcatctcanacttcttcatcatttctttcttanactctgataattgt

SEQ ID NO: 303604 - DNA, 397 bp, Glycine max
  unsure (1)..(397): unsure at all n locations
tgtaagagcttggtcacttcctttntcaccacatctagaatgacggngttgagtcgtcgctgtggctacctcactggcttagctgcatcctctaaaagtatcctatgcatgcaggtagatgggctaataccaggaatgtctgctaaagtccatccaatggccttcttgtgcttcttgagcaccggcaacaacttctcctcttgctcaacatcaagggaagcagagatgatcactggaaatttgatgcaatcctaccccgcaagggcattggatagaagactccaagtagattgggccagagatccaagggaaggccctagggttctcatgagccttaaggtagattntgagcccatgggctaagtatgagcccgcttatctttgtaattattagaat

SEQ ID NO: 303605 - DNA, 409 bp, Glycine max
  unsure (1)..(409): unsure at all n locations
agctnttctttatagngtatgtttcttgttttatttattggtattggatatgagtttattgttgcatatggaactgatcttctgctgttatcagattaagtctaaggatagataataaggcatcttctcaagaaataacaaaataaatttctacaaactaagattgagtcatttaacaaggcttgtcaatctccacgtgtaacatagaaaacactccaaacagtccttgagcagaacaccacatactagccaagaaagtaatcctgtcccaaatgttgtgttgagatcacaaaatgcctttgaaaattctagcattcctttgtagctatagacactagagagccaccanaacaagcactgccacagaagtttagcttctttacaaaaagccagatcctctanattgact

SEQ ID NO: 303606 - DNA, 413 bp, Glycine max
  unsure (1)..(413): unsure at all n locations
tgttcgcacatcgttcgcgtgtatgatatacactcgacatggtttgaagtagaagagaccttcaatcctattacgcaacgtgacggacaaaagtggacagttaacttgaatgatcattattgncaatgcagaaagtattttgcgcttcactatccatgttcacacattattgcagcttgtggttacatgagcatgaactactaccaatatatagatgttgtttacacaaatgagcttaaaagtttactccgcacaatggtggcctcttgggaatgaagcgactattcctccttctaatgacgcatggacacttatccctgacccaactacaattcgtgcgaaaggtcggccaaagtcaacaaggataaggaatgagatggattgggtcaaaccatctaagcaccgacaaaaat

SEQ ID NO: 303607 - DNA, 159 bp, Glycine max
cgcccgacccttgaccatttttatagtcgacagctaacttggaatcttgccttaatgcgtttatttcacaattaaggggtgaaaacaggggtaaagggacgataacggcataaaaactacgcccacctgtgcctttatcaatctttgaatatacaacat

SEQ ID NO: 303608 - DNA, 308 bp, Glycine max
ttgcagcctcgaaatgattagaggctagagtctctatgtataggctgatgagtactccagcaccatatataatgattggtcctgtcgtgtcaaatatcataaactacccaccatactcttgaaatctatagcatacagctttcttgcttcgtcgaactttgataacttcattttgcactccatcagtgatgcaattggcttgcatctatccatcttgaatttattaagcatcttctttgcgtagctttgcagggaaatgaagaattcatcttctttctgctttacctcaatggcaagatagtatgaca

SEQ ID NO: 303609 - DNA, 495 bp, Glycine max
  unsure (1)..(495): unsure at all n locations
attgacactatagaattctgtgacactctagaaaaactacgcntgctcgagcttggtcactacgcttgctgcaccacatgaacgagttgtacggattgttgacaccgncttcacgctgacagctgngctggagcacgtgactatcactaccctcatcctatgcatgcaggtagatgggctaataccacgaatgtctgctaaagtccatccaatggccttcttgagcttccttgacaccggcaacaacttctcctcttgctcaacatcaatggaagcagagatgatcacttggaaattgatgcaatcctaccccgcaagggcattggatagaagaactccagtaaattgggccacagatccaagggaaggccctagnggtctcatgagccttaaagtagaatttgagcccatgggcttaagattgagcccgcctatactttgaattattacaataagtttttcctttcggtagagcctggattttggccattctcn

SEQ ID NO: 303610 - DNA, 427 bp, Glycine max
  unsure (1)..(427): unsure at all n locations
agcttggataactacaaatttaatgcatagaaaaaagttcaaaagtcaatgccactatgataggtataaaaaaatcaaatatatcatgttattttttaaaattggttacattattaaaaatatatttttcctattaaataattttttatattttttttactctggttgaaaaaggaattaaataataaatcaatttaaagaaaaaaaatcttcaaaaatgaaataaaactcctttttaatcaatgtaaaagaatacaaaaataatatgaagaaattaattgaaaaataactttctttgttccttttcttgtgtaatttaacattntatgtcttttcctatgtacaagagactataaacgtaagttatgtgaaagaaacattntcatataatcattacggatttgaatcctctcatgtgaaattcttg

SEQ ID NO: 303611 - DNA, 356 bp, Glycine max
tctctgtctaagtttctctctctcactattggctatgatagccctgaatttcttttattgcaggaaacgttccgtgtcacgagtttcttttatcacgtcacactcacgtttgccctcttctgggaagaatcattgatagccctgaatttctgctctcataacgctatattggcattgcgtattaccttgtacatgccagctttcatattcatcattgaatacgcagggataatctctatgatcctcgagtaagagtattataacatggcaaggatacttctgagcacagaaatagctcacacagtttgttatcttgatggcgatgttctccctcatttctgtctgtattaacctta

SEQ ID NO: 303612 - DNA, 384 bp, Glycine max
  unsure (1)..(384): unsure at all n locations
agcttgttatagtatcttaccacactcttgacatactctntacttctgattcttgtaataattgagttaatgaaatgatgctaatgtgtctcagtcccactttatgtatgcattntctattctaatgcaaattttgtcttccaagtctttccaacatttaaaaaattaggaatcaatatttactcagatttttaaatttaacattccattnttcatatattgatcctacttgagagagcattgtttgtgacagtttggctttttttttaatctttttctgatctntgtatactgcagncaattgcaactttctttgatcanattatggctaagattggnggaaacacttgctgcccaggtacataatatacttcaacgaatcat

SEQ ID NO: 303613 - DNA, 279 bp, Glycine max
tcgcttaagcgaatagagctctccattggaacacatgtaacccttcgccataaaggcctatatctaccgaaactcttaactagatgtaagctctatcctccctgctgctatctttgaattcttattgtctcgcttttgtatcaaacctttgtcatgtgcaagagctcttatatgaccttttacatcttgaaagaaaacactacatgcggggacagaagctccgtcgctaagacaatttagagaccggccgtgagcctaccatactacataacttcctat

SEQ ID NO: 303614 - DNA, 426 bp, Glycine max
  unsure (1)..(426): unsure at all n locations
agcttgtctggacaaagacaaggacagccagtatttatcaccaaacttgaagtatgttcttaaatgcatgataaaataattntatcatgagattgatttatttatttctgtttttaatttgaccagtctattttaatatccctgtatggcctttntggtcttgtttttaacaatagaaattgacgtaattttgtagcaactgttgagctctttgttgtatgatcctgatgcataatttctttgtaacagggttacaggaattcttccgcctctgagacgtaagttcaagaagttttaatctcttctcacaagtttagaanatattgagtggttgaagtttacaatattgttctaaaattattggtgttatttgctggtgagttgattatttggtttgaatcaagtattangtattaagtcatagat

SEQ ID NO: 303615 - DNA, 389 bp, Glycine max
gctgacatcgccgctgtgcgactgtgttggctcatcgataactgatactacgctgcgtaagaaagagagccctatgccatccttggtacctgaccatgcatacgatcctctacgtgctacctatgacggctccctatatgacagcacttgggagtgcgctctgacgcttgattaccactactatctctcaaggagttgcaggcctcttgactatcataactgggctacggcaggatcgatgcagctccgactgatgctttactcaagaatgacaccgatctatcatcatgcgtcaaggaggctactgatgacagcttcacgagtatgactgtagagcaacgatggtggacttcaacctcaatgactttgatggcgaccttattaactct

SEQ ID NO: 303616 - DNA, 229 bp, Glycine max
tagagcggtgaacatccacacacaatgcatcaatagcaacaaagacaaccagcacggctagatgaaatcagtgatacgccaccttctgatctgaacgaccccaaactgatattacgccatccatatacggaaccagaacacttataccaccacagcatccttggacaacggcagaaaaaatattgcaaccactctcaatcaaagagcccaaccgagctctgacaacatc

SEQ ID NO: 303617 - DNA, 66 bp, Glycine max
tagctaaaaaggaaactcattttacaataaagagcaacattaaagaaactttccctcttagacaac

SEQ ID NO: 303618 - DNA, 387 bp, Glycine max
  unsure (1)..(387): unsure at all n locations
agcttcttatccaaggctcatcttggtggtgaagctccttcttccctggcttattccctagtggatggcgcctcctctcacctcttttcctttgtctttcactgcatctccatggtggaaaatcaccattaaaggacctcattgaagctcanagatccaacctccatagaagccccacaatcaagcttccatcagttgtagacccctaagaccaagaaaagacagctttcacatgtccctttggtgtttttgcttattgccgaatgccattcgggttatgtaatgctcctgctacgttccaaagatgtatgatggctatctttgctgacatggtagagaagtgcattgaagtctttatggatgaattttcagtctttggcgcatctt

SEQ ID NO: 303619 - DNA, 438 bp, Glycine max
  unsure (1)..(438): unsure at all n locations
tatgcgcatatttccttacgaacgttcactttgcgcaagacatcctattaactaagaaaaatgcacccatatacaatcaaggcagcttcgttacctagattatttacatgtacttccaaggtgtatttgttacttacatcacacacatctccttggctaaatttacatacatgcatactcaaagcattttggggtaccaaaaattgcacatgtgcacatcttggtatttctaatacctatacatacacaaacttcatgatgaatattgactatctacacaataaagtgctacatttcatgctcttttcaagtttttgctacctaaagctgcatgcaaattcaagtatattttcctttgctgactaaaattgtattaaaaggtatatattctttntgtaatgtattttctttacataacatgcaacatatttatatata

SEQ ID NO: 303620 - DNA, 392 bp, Glycine max
  unsure (1)..(392): unsure at all n locations
agctntaactcggatgtccgattcangcgcataatatatcgagacacttgatattgaataacagaagctctcgagaaattcgaatggtcataacttttcacacggatgtccgattcgggcgcataatatgtcgagacgctcgaaattgaacaacggaagctctcgagaaattctaatggtcataacttttcactcggatgaccggatcaagcgcataatatatcgagacgctcgaaattgaacaacggaagcttccgagaaattcaaatggtcataaactttaactcagaggcccgattcatgcgcataatatatcgagacgcttcgaattgaacatcggaagctctctagaaattcaaatggtcataaactttcacttggaggtccgattc

SEQ ID NO: 303621 - DNA, 393 bp, Glycine max
  unsure (1)..(393): unsure at all n locations
tgtagcaaatgcaaacggcaataacgttntactcggatgttcgattgagtcacgtaatacatcgaaacgctcgaaattgaaaacagaagctctgtgcaaattcaaacgacaatacattttaactcggatgtccgattgagtcccgtaatatatcaagacactcgaaattgagaataaaagctctgaacaaattcaaacgacaataactttttactcggatgtccgattgagtccagtaatatatctagacactcgaaattgagaatagaagagctgagcaaattcaaacgacaataactttttactcggatgtccgatggagtcccgagcgtctcgatatattatgcgcctaaattggacatccgagttaaaagttatgacaattttaattgc

SEQ ID NO: 303622 - DNA, 326 bp, Glycine max
  unsure (1)..(326): unsure at all n locations
agcttattgatgtgcttgcttcagttggtgatgctgctacctatcgtgaacacatggatgcgattcttgaaggtctacctagggattttgactcanagattgctctaattgagagtcgtctaccacacatcaccattgaagaagctgaaggttacattcttacgcaagaactatgaattcgaaaaatacactacactcgaatctttgagtaattccttcacaccaacagtgaatcttactcaaatgagttcttcgcattccactgagaatgataactcaaattcgtactttgacaccaatacaatgtataccaatcagtattcctc

SEQ ID NO: 303623 - DNA, 423 bp, Glycine max
  unsure (1)..(423): unsure at all n locations
taagctataagacttgcttattcacagttcagtcagtttaagatctcttataattgtctaaaggagaaatagtctcttaatgagctcatttcatactgtgtgcaagaagagcaaaggccgaagcaagaaaggacctgctcatgttgtgagtacctctaaatacaagggcaaaagaaaaagaactgaggagctcaagaatgaagctgctaaaggtttagtacaaaagaaacaaaatcaaggtgacaattgtttcttttgcagtgagcctggacatgtaaagaagaaatgtaccaaatatcatgcttggcatgcaaagaaaggtatgtttcttactttggtctgttctgaggtcaatttagcttcagtacctaanaacacttggtggttagattctggtgtcactactaacatcagtgtttcaat

SEQ ID NO: 303624 - DNA, 428 bp, Glycine max
  unsure (1)..(428): unsure at all n locations
agcttatgttgcaaacatttaaaatagacctcctcagcagcaaaaccaacaacaacagaataattatgacctttcaagcaacagatacaatccaggttggaggaatcatccaaatctgagatggacaagtcctccacaacaacaacaacctgtccctccttttccagaatgttgctggtccaagcaagccatatgttcctcctccaatgcagcaacaacagcagcagtcacaacaaagacaacaaggaactgaggctcctcctcaaccttccttagaagagttagtgaggcaaatgaccatccagaatatgcaatttcagcaagagacaagagcctccattcagagtctgacaaatcagatggngcagatggctactcagttgaaccaagctcagtcccaaaattctgacaaattgccttcacaaact

SEQ ID NO: 303625 - DNA, 362 bp, Glycine max
tcttatccaaggcaattcttggtggagaatctccatcttccttggcttattccctagtggatggtgcctcccctctcctcttctcctttgccttccgctgcatctctatggtgaaaaatcaccattgaaggacctcattgaagctcacagatccagcctccatagaagctccacaagcaagcttccatcagtaaggaggtaagtgtctcctccaacaggatagctgcaaaagaaactcattcttcactcaagagaaacattccagatactatcccgcttagacgacctccatattaactgtttcagaaaaaaacacttgctagcattgccacacctcttgggcttgagtttattcctcaagt

SEQ ID NO: 303626 - DNA, 396 bp, Glycine max
tagcttgtcatcttgaggaatcaggggcaagtaattgaacaagtgtacgtagaatagaatcacctaaattgataaagaaacatcataaactcatacatcctatgcaaacaaggcaaatcaggtcccaatagtatcacttatcttttaatcatcttatcttttatttttcttatcttatcttgttttatctttatcttaatcttttatttttcttatcttttacctttatcttctttatcctttatcttctatctttgtctttattttttataatcttttaattgaatattttatcttctctatcttctattttggtctttacatcttctatcttttctttcacatctttatcttatctgctatattgtcttatctttattttaaattaattatcta

SEQ ID NO: 303627 - DNA, 367 bp, Glycine max
tgacaatattacaaatctcaatatacgttgttaagtgtgattatggatcttcatttggtaaaccatgaaacaaattgctctgtattagttgtatcaatgaaggtgggtaggttaagttttgtgcttgaacctctggccgcgcaacacttgagaaatattgcagcatcgaagtacttgagtaatcttctcaggccactcatgcatggtgctcttcatccatgacttcggcttcaaattctgctatttgagattccctggatgtaggcgaattacaagatgatgactcagcaaagcgagtctcttcaaagattgatgctactgttctgtcgtgtaaaagctttctttttctctttgcgctgtttcttct

SEQ ID NO: 303628 - DNA, 358 bp, Glycine max
  unsure (1)..(358): unsure at all n locations
agctntcaatgtacaaacatttagtatatacaactcttatagagacagacacaatacagcagtcacaggcattgaactactccattgtgattgcatggatcatgagtatataagtatcatcacatattcacatatatctcatttatgattacttattatgcacatacctgtctgtccatccaagcaacactgtgacagatcacccaagcaggttgaatattctgggggaggactaggatactcgccagggcaatatgatccccaactactctcttctgcattggaagctgtggatgcatatatattgatatgttaggtaataagacctgctatgagtactccacatacacatgcctcc

SEQ ID NO: 303629 - DNA, 417 bp, Glycine max
  unsure (1)..(417): unsure at all n locations
ntgcggngtgagcttacccgcatgtctggctctagtcacggtcgacatctcccactttcatatcttttgcttcgtagccatgacccacatcttccaaccatcaccacctccaattggtagccatgactaatatatttccaccatcaatatctttgtttagtaaaagtgttatgggatgggttacgataagtgtgcttgtgtccttaccctgngtttgcaaacttatccctaaccaaattaatacccaacaatacaggggacaagattgggtggactagacttgttagtattatatatatatatataatattttataaactattcttttaagtattgattaattaacaaaattgtgtcacattatataaggaaaaaatatccatatataaatatttcattaataacattaaacactat

SEQ ID NO: 303630 - DNA, 411 bp, Glycine max
agctttgagcctattcaaacgacaataactttttacatggatgtctgattgagtcctgtcatatatccagacgctcgatattgaatgttgaatctctgagccaatgcaaacgacaataactctttactcggatgtctgattgcgtcccgcaatatatcgagactcatcaaaattgactggtgaacctgtgagctgattcacacgacgataactttgaactcggatgcctgattgagtcctgtcatacatcgagacgctcgacattgaatgttgaagctctgaaccgattcatacgaccataactgtatacttggatgtctgattgacgctcgtacatatcgagacgctcgagattgtatgttgtagctctgagccaatgcatacggacataactctttactcagatgtctg

SEQ ID NO: 303631 - DNA, 409 bp, Glycine max
  unsure (1)..(409): unsure at all n locations
tcaacattcaattntgagcgtctcgcaatattacgggactcaatcagacatccgagtaaaaagatattgtcgcttggattggctcatagaatcaacattcaatatcgagcgtctcaatatattacgggactcattcagacatccgagtaaaaagttattgtcgtttgaattagctcagagcttcaacaatcaatttcgagcgtctagatatatgacgagactcagtcagacatccgagtaaaaagttattgtcggctgaattggctcagagcttcaacattcaatttcgagcgtctcgatatatgacgggactcaatcatacatccgagatgaaagttattgtcgtttgaatttgctcagaggttcaacattcaatttcgagcgtctcgatatatgacaagactcaatc

SEQ ID NO: 303632 - DNA, 340 bp, Glycine max
  unsure (1)..(340): unsure at all n locations
ttcttgatctaaacaaatatctaatcattccaatccactcaaatcatacaattgctcattcaaatcattctcaaacactcatttcatgcaaaacaatccactacatatcattttcaatcaattcattgttcaaacacgcttttggtacaaacaaacaactcaaagtgctgacatctatataattgaaatttacaacaattgacatatacaatctgaaattaatatgactgaacataaatcataaaataattgaatataaactataatgttcgagatgcacaaatttacatgtcctgctgctgatggtgctcctatgcatgctcattaangatcaacacct

SEQ ID NO: 303633 - DNA, 297 bp, Glycine max
ccaaaaatatataccatctgagataccaccctatatcatgcagcctccttcaacagcggatgcctattgcgcataagcctctctatgggggcgcatgctccatgcctgtctgacattgatatgatccaccctgctccataatttctatgcgattcaattctgctttgatactccctgaatgtagcgaatatttcttttccgatgctagaggaagacaatagcaatattgctctcttaggatatctctagacacagcatcctaccttggtggttccttaacagatcattcacgtgtct

SEQ ID NO: 303634 - DNA, 411 bp, Glycine max
  unsure (1)..(411): unsure at all n locations
agctntaaaccaaaacatgtaattgattaatacgtagcaataatcgattaaaacagacaattttgaaccaaaacaccacaaacacataaatggcaatcgattaaatcatggggtaattgattcaaatataaagtttcaaaaattgataactcacagaaacatagtgtaatcgattaacatgaatgagtaatcgattaaaacaatgaaaaacacgaaataatcaaagtgaaacatgtatttttcagagaaaaatcaacttcacatcaacatactaagacatttgaagaanattaatagacatggagagcatatataacaggctacttgtactaagcttagtcgtcattcaatactagacccatctaagatacctagttcattcctaatgaagaagaacctatctctagcaac

SEQ ID NO: 303635 - DNA, 405 bp, Glycine max
tccttgagaagcaaggaaggtagcatcctagggaagcgatgaagaaagcttcctttggaagcgacgaagaaagcttccgctagaggttagctactcacacccctccaatagctaagctcaatcccataccaaaatacatgaaaatgcaaaaaaattcctactacaaagactactcaaaatgccctgaaatagaaggctaaaatcttatactactagggtatccttaacttgtagggtaggtgtgcccttaatttgtagggtaccctacaaacctaaaatgaccaaaatacaaggcccaaaagaaggaaaacctattttgatatttacaaagaaaaatggacccaaccttggctcatggtgatgcaatcttaccccccaagggtattggatagaagactccaagag

SEQ ID NO: 303636 - DNA, 435 bp, Glycine max
  unsure (1)..(435): unsure at all n locations
agcttcttcataaacgtggcatttgtgtgcaatacataatgcctaaaacaccacaacaaaatggtgtatcagaaaggcgtaatagaactttaatggatatgattaggagtatgttaatcaattcaactttactcgtatttttgtggatgtatgccttgaaaactgccatgtatttgttgaatagggttcctagtaaggcagttccaaagacaccttttgaactgtggatgaataggacacctagtataaggcacatgcatgtttggggttgccagacagaaataaggatttataatccgcaagagagaaaatnggatgcaagaacaatcagtgaatatttcatttggtatccaaaaaagtcatggngtatatgtttttttgcctaatcatagtatgagaattggtgaaactggaaatgcanggttactgaaaatg

SEQ ID NO: 303637 - DNA, 451 bp, Glycine max
tgtaagcgacactatgcaatactccatcttatcgatgtatgaacttatgatgcagcgctccgaacgccatcaacagctgttccgcaccattgctgactgtgatggtcgctcttaaggtacttaccatggtgaagaaagataccctctctcataaggcctccttcaactgcaataacctatttcctcatgacaacaatcaaggtgccgaatgctccatgcctgtgtgccaatattaggatacaccgtgtcacatgatctgctatgaaaaccactcatggctccgttcaagaaatgagtggccgagcgatgaagtgctttgccgaatgccaacggaaagagaatgagcaattgtgcctctctatgcgaaacgccatagacacaattatccaaccttggtgtcgtcctataacagaacatgcaacaagatctaataacaatgcttggagttgaa

SEQ ID NO: 303638 - DNA, 375 bp, Glycine max
  unsure (1)..(375): unsure at all n locations
agctntacagtagattntagtaatgacccactaacctagaattaaaataacttaatgccattaacctagggaattaaaaaaaacttaatggctgagtgtaactgaaattgtggcaaccaaaagtcacccccaatagccaacaagtcatccaccatttggtctcccaaaaggctgatgcctatgttgccaattgggcccttattacaacttgaactaaacctaactaaagcccttttagttgattaacccacaacatatttttggtcagccaactttacaaggattgggccattatttagacagactanacactctaaaattgaaacaaagtggtgtcatttagtcctcctccatttgggccatgatacaactcac

SEQ ID NO: 303639 - DNA, 246 bp, Glycine max
tctcgatatatgatgtcccggagtcggacatccgagcgagatgttatgaccattcacatatctcgagagctagcgatgttcaatggggagcgacaccatgtataatgtccgcgaatcgctcatgcgcgtgaacagtcatgaccattccaatttctcgagagctatcgttggtcaatgacaaccggctatataactaatgaccccaactccagcatccgagcgaatagttaggacccttcacctttc

SEQ ID NO: 303640 - DNA, 434 bp, Glycine max
  unsure (1)..(434): unsure at all n locations
agctncatangataccactgggcccagggtcattanaaggtttcatactggaaaattacattccttaaatctcgtcatttttgtaaaggctttttgaatggctttccggntcaacaaactttgcaaatctttgaacatcgtgaaaaaaggccaaaaattaatgtagtgaccttgagcttcaaagctttatttgtcacatttgtcaaataagaaaacctttcaaaagtttcaaaacatttgacattatttataanaagtccccaaataaatactttttttattgcgagcattatcattnntgtatactcagttttatgaataatagtttacaaatacctagttgttntaaanttaaaaattaaagtttattgtgttataaaatctcaaaagcatactcattttattggagcatattttttatgattcaatttata

SEQ ID NO: 303641 - DNA, 431 bp, Glycine max
tcaaaggttgtattgcattagaattccgtttgactcatttttattttgaagattgccttaaaattaaaatttagaaataagaggtttaaatataactaaaagaattaatatatatttttttaaaaatttcattaacttaaaatagatcatctgaaatgaagaaattaaggaagtttcggacatgcggttcaaacttgtggaaaatatgtgtgtgttttttttttgttcgttgctttctgaaatttatgattgtgcgtaacccgaggtctacgttctacaaatgaatgccatttagactaaagaaacatgactccgcattttcatctaaattattactttttagaatgctaccgacacattaacaacctaagcagcacattaacaaaatttaactgatcgattctagttcccaaccctcattttgggttatt

SEQ ID NO: 303642 - DNA, 433 bp, Glycine max
  unsure (1)..(433): unsure at all n locations
agcttgtagaattatggngtacccatcacatgtggtactaggtggcggtcgggcgatggtgcacaacaagctttccacatccacaatgcgcgcataaacccaccatcccctgttgcccacctccatctgagctcacgtactcccacgtagcccatatcctcgtttctctcaacaccgggtccccatcaatcctctcaagcttccacaacatccaagcaaaacaacattcaaacagcacaagctatcacagccaagcaaaacagagcanaggcagaaaactctgctcaacacatcaaccaaaatcacagcttttctcacttanagaccccagtaacaattccttcgatccaattcgttaaccggtggatcgactccaaaattntactggaagtctatagtgtataagcctacattgtgaccgttgggatctact

SEQ ID NO: 303643 - DNA, 80 bp, Glycine max
tctatactctatacaagaattaagctctgataccacttgttagacaagtggcctcataaatcttaagagggggggggggg

SEQ ID NO: 303644 - DNA, 422 bp, Glycine max
  unsure (1)..(422): unsure at all n locations
agcttcttatccaagggaattcttggtggtgaagctccttcttccttggcttattgcctagtggatggtgcctcccctatcctcttctcctttgccttccgctgcatctccatggtgaaaaatcaccattgaaggacctcattgaagctcaaagatccagcctccgtagaagctccacaagcaagcttccatcaagtggtaatcagagcacaagagcttcaagtaggtgctccttaaacctccattaattntttttctttaccttctcttccattgatgattcttcattnttctccatgtatctcctcacatgtcttgttctanatgttgttaacatgattctttagagtttccaccgattaaacttgctatagaagttagaattgattntctatggntcacatttcttgttcttgttcttg

SEQ ID NO: 303645 - DNA, 397 bp, Glycine max
tgaatcggacctcagtgtcaaaagttatgaccatttgaatttctcgagagcttccgtgggtcaatttcgagcatctcgacatattatgtgcccgaatctgactttcgtgtgataagctctgaccatttgaatttctcgagagcttccgatgctcaatttcgagcgtctcaatatattgtccgcctgaatcggagctcagtgtgaaaagctatgaccatttgtatttgtcgaatgcttccttggttcaatttcaagcatctccgaataattatagtcttgagtctaacctccgtgtgaaaagatgtgaccattcgaatctctcgagagcttgcgttgatcactttcgagcgtctctgtatattatgcgcccgaatcagacatccgggtgagaagtcat

SEQ ID NO: 303646 - DNA, 430 bp, Glycine max
ttcttagctacacacacgcctctcataactgagctcacctccttgagaagcttccttaagaagattcctaaagaagctagagtttaactacacatacctctctaatagctaagttcacctccttgagatgagaagctagaacttagctacacaccccctatagtagctaagctcacccccatgacaaactacatgagaatacgaaataaatccctactacgaagactactcagaatgcctcgaaatacaaggctgaaaccctatactactagagtggccacaatacattgcccagacgaaggagtaacctattctaatatttacaaagataagcgggctcatacttagcccatgggctcttaatctagcctaatgctcatgagaacactagggccgttccttgtatctctggcccaatctacttggagtc

SEQ ID NO: 303647 - DNA, 129 bp, Glycine max
acttcatcttgatgggtattctgccgttgtacaagatctatggacacaatgttgaatgctcttgataggctcctatgcgctattgagaatgaccattcctaatctctacagagccttcgtcgctcaatt

SEQ ID NO: 303648 - DNA, 389 bp, Glycine max
  unsure (1)..(389): unsure at all n locations
ttcttcaacctttagtgcccgtttctgccccacatcgtgaaaggagagcattnttggagtcgtgaagtgcgtggctacgagtggaacttcgaacatccaggtttgggtggacttctttctctcttanatttcgtgggtatggnggtttgggagatatgatgggtggctttgttagttttctgctgtgtgatgattatttgtgaaggcatttgctgaatacttgatgaaatcgccatgtttggatgagttagacatacccattctggtttatgggttttggtgatgatgtttgtgatggttatatgctgaaattgctgatggaaatctgttatagacaaagggtagaactaacccaaggttagaaagtgagaatgtgattgtatgagtgg

SEQ ID NO: 303649 - DNA, 403 bp, Glycine max
tataggatactaaggtaatttgagcatccattctggtgctaccaagatgtatcatgatttaaagacgatgttttggtggcccaacataaagagagaggttattgagtttgtgtatgcatgcctagtctgtcagaaggctaagatagaacattagagaccttcaaggaagttacaacccttagagataccctagtggaagggggacagtatttccatggattttgtggtaggactacctaggacccctagaggcttagattctatctgggttattctcgatagattgactaagtctgctcacttcattcccattaatatcagattttccttggaaaagttgactaccttgtatataagtgagggtttcaagttacatggtgtgccatctagcatagtatctgat

SEQ ID NO: 303650 - DNA, 411 bp, Glycine max
  unsure (1)..(411): unsure at all n locations
agcttcctcactcttcagtcgcatatatatttcacacctattccggtaatttaaatggccaaacaatacattctcaagcaccttgagaataaattaaacactaccatgggcatgcatattgcaaaaaatatgaccttttctctaataaatcacttcaaaccaatgataactaatcaatattatgcaactaattaaaataaagaatggaaaaaagagttgttttaggactcaaattataaatgaaagctcaaaattgaaactgccttgcatatgacacctaagaaggatagattatgagatatgttaacctttccttacctgtattcgagctctagaccctactatgatatttgagattggcctgcaagcttgattaaacatgcttttgntatagtcactcgtaagaagttt

SEQ ID NO: 303651 - DNA, 426 bp, Glycine max
  unsure (1)..(426): unsure at all n locations
ntcatgattaacgaaatctcatctctaagatatggctatacatacataaattaggtgttgcaatggatatccttctattaagctaattttttaaagtattattcctagcaagcacatacaagggtcttgaaatttccattttcgcctgtggcagtgtgagtaggggaagcagacacgtcacacggacacgtggcagggttgccactgcattntacgaaacgagaatgggcatttcggtcattgcgtagggtagtactagggtttttggggtacattcacatagtcggntgttgttgctccaatttcttattntggtgcatgcgagtgaggggctttgtaaattaatttgttctagtaatagtacgggagctaatagtagtatttctgtgattggtgttgcagattgatcaagtgaatataatattg

SEQ ID NO: 303652 - DNA, 426 bp, Glycine max
  unsure (1)..(426): unsure at all n locations
agctttccttttttctcttttttttttctctcacctgatcttcattcttcttcctcttttcacttctgttctaccattttcttgcacaaaatttcgtgccttttccattagtgataatcatagaaggataaatacttcatccatccaaggatccactccaagcaagactgaatttgcgttctggtttagcatttataatctttgtgaataaaatctttctcttcaatcctatttccgattttcatgattatgattatgcttaggactgaaaacggatttggctatggattaatttcctagatttgaaatttaatcatagactatttggaggattctccaacctaatttgtgatctcgaacaatctaaggatagattcgattgaactatctctaatgcattngactgaacttttacactgaacatca

SEQ ID NO: 303653 - DNA, 429 bp, Glycine max
  unsure (1)..(429): unsure at all n locations
tctcaaggaagttttcttaagaaagcttctcaaggaagttttcttaagaaagcttctcaaggaagctacctagtctataaatagaagcatgtgtaacacttgttgtaactttgatgaatgaaagtcttatgagatacacttcaaagttccacttctttccctcttttattccttcaatttcgtgctccccccttctctctttcttttcctccatcgaagcatcctctccaagctttttatccaaggctcatcttggtggtgaagctccttcttccatggcttattccctagtggatggcgcctcctctcccctcttctcctttgtcttccgctgcatctccatggtggaaaatcaccattaaaggacctcattgaatctcanagatccagcttccatagaagctccacaagcaagcttccatcaacata

SEQ ID NO: 303654 - DNA, 414 bp, Glycine max
agcttcaacattcaatttcgagcgtctcgatatatgacgggactcaatcagacatccgagtaaaaagttattgtcgtttgaatttgctcagagcatcaacattcaatttcgagcgtctcgatatattacgggactcaatcagacatccgagtaaaaagttattgtcgtttgaatttgcttagagggtcaacattcaatttcgagcgtctcgatatattacgggactcaatcagacatccgagtaaaaagatattgtcgtttgaattggctgagagcttcaacattcaatttcgagcgtctcgatatatgacgggactcaatcagacatccgagtaaaaagttattgtcgtttgaattggctgagagcttcaacattcaatttcgagcgtctcgatatattacgggactcaatca

SEQ ID NO: 303655 - DNA, 416 bp, Glycine max
  unsure (1)..(416): unsure at all n locations
gtgagccaatacaaacgacaataagttnttactgggatgtctgattgagtccagtcatatatcgagacgctcgaaattgaatgttgaaaccctaagctaattcaaacgacaataaatttttactcagatgtctgattgagtcccgtaacatatcgagacgctcgaaattgaatgttgaagctctgagctaattcaaacgaccatatctttttactcgggtatctgattaagtcccgtaacatatcgagatgctcgaaattgaatgttgaagctctcagccaattcaaacgataataactttttactcggatgtctgattgagtcccgtaatataacgagacgctcgaaattgaatgatgaacctctaagccaattcatacgacaatatctttntactcggatgtttgaatgagtcc

SEQ ID NO: 303656 - DNA, 426 bp, Glycine max
agcttctcccccaattttctataaatagggggagaagtgaagtgaaaaagggttcagccccttaggcacttctctctctttctaatttgcttggaaaaattgtttccgtgaagaaaatccaagccgaggcgcttccgaaacgtttccataacgtttccgtgaggaatttcgggaaggtttcgaccgttcttcgacgttcttcattcgttctttatcgttcttcgatcttcaacgggtaagtaactcgaaccaagcttttcgattcattctatgtacccgtggtggtccacattgtgtttcgtgtatttctattctcgcttcatttactttttatacccccttttgacgtgcttaagccattttatttaagtcatttctcgcttaacctataaataaaataaatttccaccgatcgtttgaaatgtg

SEQ ID NO: 303657 - DNA, 367 bp, Glycine max
  unsure (1)..(367): unsure at all n locations
tgtgaaagtccttctgattctatttatgcatttctgactttatggcatgagatgaagtgtaaagactggacctcttgctagttgttattgatgaaaagcttaaacacttgtgcttgagtgaaacagtagccgtgagactgtggtttaagctactttccttgatatatgtcttatgcctaactccaattaattgtacaggatacattatattcttctctttgaataattgcatgctttgtgaaagacaagtgatgagggcattttacttcattctattatcatgcaatcaatagtttttgttgcatacacctttgtacatagtcactgcatattcttgtcacttgnngaccaatgagttgttctttat

SEQ ID NO: 303658 - DNA, 375 bp, Glycine max
  unsure (1)..(375): unsure at all n locations
agcttgtattatttgcaagatcatcttccttgacaactccgtgaaaaagattgccgtcaatatgaagagataacaatttagagagtgatcgaagactttcaaatggatttccactgaatttattcatagagagatcgagatatcttaatgatgaaaagtttccaaatgatctaggaagagcaccaccaatttgagttgtggaaaaaagtaacgtgtcaatatttttaaatgccccaatatgatctgtcagattgcctgaaagtcgtgaactctgaactgcaagtcttgtgagtccatgggaaataccaggagcangaatttctaaaagtcattaaccctgtggttgagtttgagatatgatanatctatcaccct

SEQ ID NO: 303659 - DNA, 401 bp, Glycine max
tgacagtgtttgatgcatcagggaacaatttcactttagtagtgggtcctaattggattcctaattttcaacttacctatttggatgtgacatcatggcagataggtcccaactttccgtcgtggattcagtcacaaaacaaacttcaatatgttggactgtctaacacggggattttagattttattcccacttggttctgggaagcacattctcaggttttgtatttaaacctctctcataatcatatccgtggtgagcttgtgactacaataaaaaatccaatatctatccaaactgttgatctaagcacaaatcatttatgtggtaaattaccctatctttcaaatgctgtgtataggttagacctttcaaccaattcattctctggatccatgcaa

SEQ ID NO: 303660 - DNA, 433 bp, Glycine max
  unsure (1)..(433): unsure at all n locations
agcttaagctccttcaactgcacaaggctcttaatatttgaagagtatccttgtggaaccttcacccgacgaagacactgacaaaaacttatcttctccttcttggacaaagtatggcaggctgngggcaagtaaattttcttcccatcagaccttgaatgcaactgtgatcgtatacccatatcagctagatcttgacgggtattcaagtcatccttcgtcttgccttgaatgttaaggagcgtcccaatcacactgtcacaaacattnttctccacatgcataacatcaatacaatgtctaacatcaagatcacaccagtacggaagatcaaagaaaatggacctcttcttccatatgcaactctgacttttatccttcttttgggtcttcccanatacagtattcaggtgttgaacccgctgatatacct

SEQ ID NO: 303661 - DNA, 417 bp, Glycine max
  unsure (1)..(417): unsure at all n locations
tctagaattnttgtcagctgcatcaaaatgggaggcaacttgaggtttttgagtctttgcatcaactcatgctcaactttagcttggcttttatgttaacagttgcccaaaaatagagcaaatcgatttgaaatttgttcatgaccatatccataatgctccatcactagcagctgcattaataagaatgcactttcatgactgttttgtaagggtatgcgctccaatctttaagcttctttcatttttacttaacaagtacaatgttattgttagattaaggttaaggagctaactaagatgaagcatttcagggatgtgatgcatcagcccttttgaactcaacaaccaatcaggttgagaagaatgctcgtccaaatcttacagtaagaggctttgacttcattggcattataa

SEQ ID NO: 303662 - DNA, 411 bp, Glycine max
  unsure (1)..(411): unsure at all n locations
agcttatgctgcagacatctataatagaacccctcagcagcanaaccaacaacaacagaataattatgatcttttaaggaacatatacaatctatgttggagaaatcatgcanatctgagatgggcaagtactccaaaacaacaacaacctgtccctcctttccagaatgctactggtccaagcaagccatatgttcctactgcaatgcaacaacagcagcagcagtcacaacaaagacaacaattaactgaggctcctcctcaaccttccttagaagagttagtgaggcaaatgaccatccagaatatgcaatttcagcaagagacaaaagactccattcagagtctaacaaatcagatggggcagatggttactcagttgaaccaagctcagtcccaaaattctgacaa

SEQ ID NO: 303663 - DNA, 406 bp, Glycine max
tatgatcaatgtcagaagatgctctttgccttaaatcactaccccaatgatcaggaatttgaatagctgcaagcaaagaatgtatatattaagaaatatattgaacaggtattcagcctagctgactacccaagaataccatggtaaaacctttaagatactaaagcataccctatagaggtgtcaagtattcagctctgccgaattcccaagtaccacaattaccttatccttcaaaggttaccttctgtttaacaatattaggtatttgtccctagcgaatacccaagcaccatggctatcctatccttcaaatggtatcttttgcctaacagcatcaagaatgcgaccatgtggaatactcgagtactatgaatatcctatcctccaaaggttatcctctatt

SEQ ID NO: 303664 - DNA, 429 bp, Glycine max
  unsure (1)..(429): unsure at all n locations
agctntggttcaatttagcattgagagagaggagagtgaaaaggaagaagaactgaagaaggagaaggggtaaagcagaaacacaaacaaaagctaggggagcgtgaaagccagtgcgaacgggtcgctgttggggaaaaaagcaaaacacgtgtagctattttaattnttttaaaattccaactttgtcaactacatgcgtattttctttttcctcttactataggggctnttatttttgtggtggcattggttagccaattgttgataaatattttaatgtattttgctgataaattggtgataaatattgatattgngtgtaaataaaatatttttttagcacacattatattaaanaaatactaggaaagttaagaaataatttcttttaatgaatatccctcaattntctctttcttagttatt

SEQ ID NO: 303665 - DNA, 433 bp, Glycine max
  unsure (1)..(433): unsure at all n locations
tcaacaacgttcgtcgataagcacttatctaacaaaatttgagtccctggcaaattgcatagcaggaataccagctcagtttatgatgagttgctttatcttggggttgagtcccgccattcgccaggaggtgcaagttctacaaccagtcttcttggctcaagcagtggcgtatgcacgcttataggaggagaaactcctcgatgcacgtaggtcacccacgcagcattttcaatcggccaccgttacaaccacggccacgtgatcaacctcagtcaaccccacaccaccattgttgcctactcctcaaagaacctcaactccttccattccttttaagtgtctcacatcggaagagcttgcgattcgccgcgagaaaaggttatgttttcactgtgatgagaagttntctcgaggtcacaagtgttcaccc

SEQ ID NO: 303666 - DNA, 413 bp, Glycine max
  unsure (1)..(413): unsure at all n locations
agctgctttttttcttttctttctggaatctattattagggcagccagaatctctaatcgtggctagtttacaactcgaactatgcgttggaaagactatacacaactgttagtgtcctttaaccctcattttactaaagccagaaacctggtaatctatcctactaaatcagttataaggttgcatgccttgaccttgcaatgtcttcatgattcatatatgcaattatgtgatagctattggccatactagtgagtgaattaatgatagagtcgacattttttttgttaaaaaaaacgatcgtttcgttcatgttggtgcaagataactgctgaggattgagttataactatcgttgtcgcggaaatgggctattccatctacatgggattccncttggagtaaagtctta

SEQ ID NO: 303667 - DNA, 420 bp, Glycine max
aactaagatgcttagattacccagatttccattagagaagaatcttcagatgtatctaatactgctcaggataatgctttacccaatcagaaggaggctacatgtggaacactggctgtcactgtgactagcgcagcttctagtcggccaaatgaatccacccacttatttacctcaattaatgctaacattccggctctaacgtcaccggcacagaagaattccgttaagaagccaacggatcgggccaaagctccttttgagaaaggctacagccaaacggactggctcaagctcacccaaacacatgctgaccttgcaagttctcatactcaatttttgtactatgcaatctcaatcattaactttggtggatcagttttcaaaatttcttccaatttcttagagctttgtaagaga

SEQ ID NO: 303668 - DNA, 424 bp, Glycine max
  unsure (1)..(424): unsure at all n locations
tatctntgatgatatggtcttcaccgacgaaaggatcaaagtgggtctgaaaagaggcaaatctgatcatcttgctttgataaatgcaaaaaaaaagctggggcaaataaagagggtgaggatgaaggagaagcccgtgttgtgactgccattcctatacagccaagtttcccaccaacccaacaatgtcattactcagccaataacctaccttccccttacccaccgcccagttatccacaaaggccatccctataacaaccacaaagtttgtcttccgcactaccaatgacgaacatcacctttagcacataccaagagcactaaccaagaaatgaatgttgcagcgagaaagcctgtagaattcaccccaattccagtgtcctatgctgacttgctcccatatctacttgataattcaatg

SEQ ID NO: 303669 - DNA, 424 bp, Glycine max
tgccgcccagctcgcctgagcgagcaaggttgcttcctccagaagcaacaaccttctggaggaatcttaaggagggcccaagttggcccgattgctatttgcacccccctttttactaaatgcacccccttctatttttttggtaattctttttccgtaacgttatgaaacgttacaaatttcgtaacgatacttatttcccttctgcaaggctacgaatccttacgtattatgtatttactctttgttagctttcgaagaagttacgaaaactcacggattgcgcaaaaacacctcttttcgacttccgcctcattacggaatttcatggattgtgcaagcctgcttccttttgcttttcgagacgtctcgggacttcatttattgtgcaaccaatgactctgagcgactcggacaaaccaat

SEQ ID NO: 303670 - DNA, 421 bp, Glycine max
tagcttgcctgtccgatgcagcagtaatgatggcccgagttatgttggggaacggttacgaacccggaatgggtttaggcaaagacaacggcggcgtaactagcctgataaatgccaaaggaaatcgtgggaagtatggtttaagctataagcccactcaggcggatatgaagagaagcatcgcgggaaggaagagcggtggtcaaagctcgcgttggagacaagagagtgaaggaagcccgccctgccacataagtagaagctttataagcgcgggtctgggagacaaaggtcaagtggtcgcaatatgagaagatgatgttttgagtacattggatttggtacgaccatgcccttttgatttccagctaggaaattggcgagtggaggaacgccctggcatttacgcaacgagcataat

SEQ ID NO: 303671 - DNA, 427 bp, Glycine max
  unsure (1)..(427): unsure at all n locations
tgttacagaacttaggaaaaatcaagaacaagcttgttcgcacatcgttcgcgtgtatgatatccactcgacaaggtttgaagtagaggagaccttcaatcctataacgcaacgtggcggacaaaagtgggcagttaacttgaatggccattattgtcaatgcggaaggtattctgcgcttcactatccatgttcacacattattgcagcttgtggttacgtgagcatgaactactaccaatatataaatgttgtttacaccaatgagcacatcttataagcatactccgcacagtggtggcctcttgggaatgaagcggcaattcctccttttgatgaggcatggacactaatccctgacccaactacaattcgtgcganaggtcggccaaaatcatcaaggataaggaatgagatggattgggtc

SEQ ID NO: 303672 - DNA, 430 bp, Glycine max
  unsure (1)..(430): unsure at all n locations
agcttctcatttgatccaacagaggaggagcatacaaactatttcactcaagtcactagcataagagacttggtcattactatcttgaaagaattctaaacatgaaaaaagggacatgtcaaaaggtctaccaatactttctgatagtttgccaaactatcatgcttgtcaatttggtaaacaaaacaaaaaatcattccccaaatcatcttggagagcctctcataagttgtagctaattcacactgatgtgataggacctcaaagaacaccatcactacaaggtagtctctactttattcatttcatagatgactntacaagaatgtgctggattntttttcttgaaattcaagcatgaagtggctgaagtatttgtgaagttcaagataatggtggaaactcacagtggctgcnagattcaatgact

SEQ ID NO: 303673 - DNA, 411 bp, Glycine max
gtgaacaatatacttggccttcatttaactgtctctgggcttggcggccacgctcagcatagtactttcgacacctactgtacgttgatttcaccaatgctgttatgggaatgttgcgacaatcctttaaaaccttattgatacattctgagaggttcgttgtcatgtggccatattgacgtccttctctatcgtaagccatcgtccatttttcttttgagatgcgatcaatccatgttgctatcgctggactcagatcaccaaagtttctaaattttgatcaaaaatgtgcttgcaaggagtgtaggctgcataaaattagttatgaataacaatttatagtataaatgatagtaaaataaacgtggccatcaaatatgaaattgtacccaacttcttcaacatttcttt

SEQ ID NO: 303674 - DNA, 410 bp, Glycine max
tgcttcatatgcaggattttttattccaactgtgtgatctgcttcagcgagaaattgcaggggaatttgtggatttgccacaaaacgctgaagtcgatgagatttgataataggttcaacctgttggcgccataacaggaagggcaaatcatcgagcttgtgagaaatgaaactatgaagagcaaaatgaatgaacgagttgatttgagcaaccattgctgatcataccaagcgccacataccatatcagaattcttacagatgattttttgagaacctaaagagaatagaaatctgagatagtgactgtgagtcttcatcaaccacttgacttgaatatagatctttgtatttatagacagaactgatattagatcatgtgtcacaactaattaacagctgtcataact

SEQ ID NO: 303675 - DNA, 421 bp, Glycine max
tactatgttataaacaaatatatatatatatatatatatatatatatatatatatatatatatatatatatatatatatatatatatattaggggctacctgtcatcttttacactccttgtacagagagagggagagagagatatggcctaagctatggcgttagcgcgcgcacagggcgtaatactccatgatgcgcgtgagtctcacacgcaggatatacaaacgggctccgataaaaaatattgtcgagtgaacatactctgggagcggcataacaaatatgtaggcgatttattctaaaagcacgctttgttcgactcggataagtgtattatatttatcatattgcgagacacagtatgtaaagtatgtctttctgaagagatatgacctaaagtgcgagagatctccttgtacg

SEQ ID NO: 303676 - DNA, 286 bp, Glycine max
tgctcataccttgtaatattgcgatcatgctgtcatttccagtgtttacgtaatctgcatgcttacttctacagcgtattcagattgaagcacctttacactggctgttccatagacgccgagattacaaattgatcaagattatctgatgagcgtgcgatcacctacgcacaccctatccatagcgcaagctacagccattatctgacgattgatactcactggctcatatacgctataagtgtcttgcacctgatggcagaatctacatctctctagatgaata

SEQ ID NO: 303677 - DNA, 332 bp, Glycine max
cttattctatttatagccttcatcttcaagtattctttggtctcccaacggttggattgaaaacgcggagagctagctgatatcactactctactgactctaatactctggcgtcaatagaggttcccttctatcatgcaccagacatgcttaatggctaccttatcttatacttcagttggaaagtcacttctttcatcacaacaaagttgcatcaatagagagcatcttttgataaagaacactgccttctacactatggactccatttattcttcataggacaatgacacatcctaagagacatttttttgcatgaaaatctcctacac

SEQ ID NO: 303678 - DNA, 421 bp, Glycine max
agctttcatggctttcaagaagaccataggcacaccaccagttctgagtcgacctaggcctagagtatccctactcttgtattttttagtagttgacagagtcggtagctcaacccttatacaaaaagaagggaagcaccagctccctatctatttcgccagccgcaaactccatgacactaagaaacgctatcacatgatagaaaaatgtggcgctagcactcattacctcggctcgatgtctcaggcctacttccagagtcattaagtggtagtcaaaatgaattacaccatcaagcaagttttgagataacaagaactcagaggaaggatgttggtctggtctatataactttcagagtttaacatgcagtatgaacatcacagccgcatgaagacatagttcatggataactttcta

SEQ ID NO: 303679 - DNA, 417 bp, Glycine max
tgttagagttttagtttgtgttaatagatgctcacatttgtatgttggatttatgcatatatgaatattcaatgctttggtgttttggtcctctttgtagagaataaatgttattttcttcataggatctgtccaaatgtatgaatcagaaagaagtcaactaaaaaactgcctactacattaaaaggcatgtcaaaacaagttgcaaagtatttgcatacagaaaagcaaatatgatcacttacacaagatatgaagtgtagaaatagtatgataaactgatttatcatatgaacatgacaagttaatgacttgcattaaatgcttcgatgattatttccaccaatagatgaagatgaaaacttcacaagttacaactatcatcctttgaacgtgttatatatacttgaagacttg

SEQ ID NO: 303680 - DNA, 425 bp, Glycine max
  unsure (1)..(425): unsure at all n locations
agcttgtttcttgcaattccaagacactagagagcttcctaataggtggcatgtctaacttgtgctttttctatctaatttgcaacctgcaaaattagaatatgaaaagcctgttagatttaaggaagtatccttgggatacctcaaacctacattggttgtgtccttaaggtacttaatgatctttttgatagatgttaagtgagattccttatgattggtctggtaccttgcacataagtaaacactccactgatttaagtagaaaagtgatccaatcatacctctatatcttgactcatccactgattntcctttctcatctaagtcatggtaggttgaagttgccattggagtagatgcttctttgcattnttccataccgaatntcctaattagttntgtacaatacttggtttgactaa

SEQ ID NO: 303681 - DNA, 392 bp, Glycine max
tgtaaccacctataaataccatgtaatcattcgttgaatgcatagaataatacttgatcatttcttccttctcttgcttctgggaggtttcttgggcctcgaacaccaagtataacagtggtgctttcattgagcatcaatggcagatggaacacgttctaaggcatcatcagagcgtctggaagatgcaattgcaaagctcactacttcgcaacttgctatgaactcgaagattgatgatcttctccatcgaatgtctcagctcgaggcgaatcaacagcaaccgcaatctccgtcgtcgtcgttcgcaggacacatgtcgccgtctcaaagccccttccaccgtatgaagcttgatgttccgagaattgatagttctgatccaacgggtt

SEQ ID NO: 303682 - DNA, 428 bp, Glycine max
agcttggatgttaggaatattgatgggaaccttcttttcttcctcttcaaggctcatgaccagtagctcaaaagggaggaaatggagaattttctttctttataagaggtttgtatgtgagagagagaagcgattagcgagaaaattggagagtggtgagactttgtggtgggttggccatgaaggaaggggtgctatgtgtcaactagctacgtgggtgaggtggaagattgtgtgtcaccaagtgagcttgcatgagaggtgaggtgttggctaattatggattagcttttatgtacaccaagcttagtttaattttacactgtgtaattataactcattaacattctatagcaactcttatcatcacatctatattagctgatctgtaatgacccgctgtcgctacatggatctagaaaccatat

SEQ ID NO: 303683 - DNA, 67 bp, Glycine max
ataagtactgcatcaacacgccccggaagaaccaagacttaatagcatgacaggcttaaaaggctgg

SEQ ID NO: 303684 - DNA, 358 bp, Glycine max
  unsure (1)..(358): unsure at all n locations
ntgatgcaacaatcttcatcatcacctgcacaccagactgaatatgctcttctctacanagggaagacacgtatccgagacaaccaggaggtagaattgacgagaaatagtgtcaaatatttcagatttggcagatcaggtcatatcaaaagaaattgcagaactagactctntaaagtgaatgctacatacgaagaagatgaagatgactcatttgagtcacttacannnnnccaatgcttcgccatctacgatcggacgattggacggcccggggtactagtcaattacctagattaccagagagaatggatcctagactctagttgctcacatcatgtaatangaaagggtgggt

SEQ ID NO: 303685 - DNA, 426 bp, Glycine max
  unsure (1)..(426): unsure at all n locations
agcttcctcggtgccattcctgcgaaggcaaacatttggaaagttagttntagtgggacattactcttanagcaaaaatggcatataacctcctcccataaatacaaacatcaatgtaaatttagagcaagcttatgcgcctatttccttacaaacgttctcttgcacaagacatttaaccgaaaaaatgcacccatatacaatcaaggcagtttcgttacctagattatttacacgtacctccaaggtgtatttgttacttacatcacacacatctccttggctaaattcacatacatgcatactcaaagcattntggggcaccaaaanatgcacctgtgcacatcttggcatttctaatacctatacatacgcanacttcatgatgaatcttgactatctacacaataaggtgctacatttcat

SEQ ID NO: 303686 - DNA, 409 bp, Glycine max
tgaaggcaaactggatgcgttggtcaacttggtaacccaactggccttgaatcagaaatctgtacctgtcgcaagggtttgtggtttgtgctcctctgctgaccaccatacagacctttgcccttccatgcagcaacctggagcaattgagcagcctgaaacttatgctgcaaatatttacaatagacctcctcaacctcagcagcaaaatcaaccacaggagagcaattatgacctttccagcaacagatacaaccctggatggaggaatcaccctagccttagatggtccagccctcagcaacaacaacagcagcctgctccttccttccaaaatgctgctggcccaagcagaccatacattcctccaccaatccaacaacagcaacaaccccagaaacagccaaca

SEQ ID NO: 303687 - DNA, 321 bp, Glycine max
  unsure (1)..(321): unsure at all n locations
agctntgagccaaaatcctgactcaccataaacctttgacccaggtgagaatgtcaattcttaccctcggaagcaaaaaaaaaggggagagggaaaatttccaatcaaagaggaagcaaaaaaggagagaaggaaaatttccaatccaaggaaaaaaagagaggaaagggaattcccaatcaaagagtgggagaaagccaaaagaaaagaaagaaaattcccaatcaaagaatgggagaaagaaaaaagagaagaagaaagggaagaaaagtcccgatcaaaaaaaaataatatgcagaaaggtctttggaccggacaata

SEQ ID NO: 303688 - DNA, 441 bp, Glycine max
  unsure (1)..(441): unsure at all n locations
agcttgacattttaatatttaaaacattcttataaaacaaatccaaacaaatttcacgaagagtacaagactactctaaccggctcatatacataagtttgtttaacaagttcatttgtaaatgatcccaaacttgcttccaattaggccatcaaattaattaatccttaattaagcctgcttatgtgagatccaactcagctatatccgntttctttatattattttctgcctctttgattaaaaactaaaatgtaaataaaaaaactaacaatcaaaaaagacaatattactttctaatcacatatgttgctttttaatctggaagacacaaaacggagagcanatgatttccatccacttataacctaccaatgttggcctttattcagaccagcggctagtggccattggctttaanttaatcgtaatataactcat

SEQ ID NO: 303689 - DNA, 441 bp, Glycine max
  unsure (1)..(441): unsure at all n locations
aaactcacgcttcacctttaagattaaagaccaaactatatcaattacctttatttgatgatgaagctccacagttgaaattgtggagagcttgtttctatgactactttcctaactttaaaactctggtgtcaatagaggaacgaatttataggtcccagagttcgttaatagttggttatttttctgagaaggttaatagttagttattaggtttgttagtaattagcttgcacggcgagcttttctctataaaagacacgcatgagcaccccttatataataatcatagtccttctatctattggttttctacataaacatctcagaatttcaccttcaacttaaacaattaaagatttaagactaggaatctaanacatggctaaatttgacaagtttttgagtataaaattaaccgtcccaatggaatgaaatatt

SEQ ID NO: 303690 - DNA, 426 bp, Glycine max
  unsure (1)..(426): unsure at all n locations
tatctnttgcttgtttagagatttctagagagagaaaggtccaagttccagagagttttgagagcttttgctgtgagaagactggcagagaacagagcgagaagaggaaaccatctgagagcatgagatgagtctgtgagtgattgtgaggttctagaggtggaggagacatccccactacttgtatttcttcaatccttcatttttctcttctctttgttgtaaaggaagcttcccagatatggagagctaaatcctttggtgggtcttccttgtaggtacttgatgtaaatacttgtatatctatttaatgatgttttatgtgttctctgtgctattagtacgtcattctagcgtgtttctgccttgatcatgtagattcatgcttctgtaggatcattcaacagttgaaactggttcgattct

SEQ ID NO: 303691 - DNA, 427 bp, Glycine max
  unsure (1)..(427): unsure at all n locations
ntggaaagtattgtttttcaccttctcgctaagccaatctactggcttcgcgagcatttgctaagtgcaacactcctgngctaagcgtgaggaagaatccagaagaagatgagttgtacatgttcgctaagcacactgcttcatctcactaagcgctccgcttcagttcatccgctaaacgagaaaggcgtgctaagccaaaaatcaccaaagtgcactaagcggaccataagtgcgctaagcgcacgagcatgaacaaggacacctatttaagcctaaaatcagattttgtgaagagagtttggactgggattcagagctttgcatgtctagggtttctagagagagaaaggtccaagttccagagagttttgagagattntgttttgtgaaaatctgcagagaccanagcttgaaacaggaaccg

SEQ ID NO: 303692 - DNA, 430 bp, Glycine max
  unsure (1)..(430): unsure at all n locations
agcttagtatccactaacaagtacaaaccaaccgaaagaaaaattgaaaaagtaaagaagagagaaaaagtaaataaacatgtagaacaccattccaccaccaaataacacgtcaattaaagaaatgtgattggacagattatatatatatatatataggagagagatcaaattacattaactttaactttgattaagtattataccgttcaataatttttaattggataatattttcttaaaacctataatgggattgaaattttatttcacttagatcatatatacaaaattttatattaatccaaaattatttgttacctcattcattcagattaaaattgacctaatataaactnttcaaaatatattaaaatatagatcgtttgattaccttattattgttcaattntgacaaaaattcacacaa

SEQ ID NO: 303693 - DNA, 399 bp, Glycine max
  unsure (1)..(399): unsure at all n locations
tgcattcctttgattntctcactgccttcatactcttccttaaaaaaattccagattttgcgtgttgttttcatcatcattattctgttgaaaatgactggagatacagctgtgaacaaaattgatttaactttggactttcgaagcctcctttctttgtgacttttcatttgggcaacagtgggattatttggcaaaggaggaacttcgtagtcctcttctacntgttgccatacctcgttagcatcgaaatatgcttccatnnngacagcctatattngatagnttagtccatcaaatacgggtacagaaatggtagtaaaggaggtttcagattccatcttatgtgtggtggctacttggngcgtgtaggtgtttgtgggttatatcacagatctc

SEQ ID NO: 303694 - DNA, 546 bp, Glycine max
  unsure (1)..(546): unsure at all n locations
attgaagcatttgtaaccatggcgaatccagctcgagtccagctgagcacctggagatcctctagaggcgagctgcacgcactgctatctcagattcttacacctggccgacaattgtgggagccacgatggtatgaggtgaccttgacttcatttacgcacacatcagtacatggtgtgtctgggtgaacatgaggtacagggcatcatatggaagactatgagcgagcttatgcacctagttccttgcaaacgtgactcttgcgacccattgttctagcgagaaaatgcacccgtttaccatccatgaagctcttttccctagattatatacacgaacctacacagtgagattatacgtacatacacacaattccttggctaaagtcacatacatgcatatctcaagcattatgtggcaccacataattgcactctgtgcacatgattggcatttataatacctatacctacgcctacttgatgatgaatcttgactatctacacaatatagtgctacatttcatgctctttnttcaaggtctn

SEQ ID NO: 303695 - DNA, 390 bp, Glycine max
gattttatggaacgagttcgataaagaaagtatcttctaataggaagacttgaactcattcattcctaatcctgaccaaacatgatcgtaatgatcaagatatgcgctcctatcctatcattcactaaaactgtattttctacgaatataaccacacaaacaagacagggaagttcagaggtaataatgcctgaggccaaaagaacagcgagtgtatacataatcataccacatgactaatcccaacacagggaatacatatggaggacaagatctgaagttattactgacttccctacataggtcaagaaataccagccatgttggttagaagagacacacttacaatgcagaggtattgcactttcaagaacagtacaggtatcattc

SEQ ID NO: 303696 - DNA, 414 bp, Glycine max
agcttacaaatttgttttaagtcagttgaaggaccaaagtaaaaaagctttttctgttattgcttgaattcaaataggtacatatatatagagagtacaaaagagagagagggaggagagaggctatgacagtgacaatgcactgttgccttctgaaaaaaaaggctaccaactaagttaccaaacatggctaaattacaaggatattcaacactccccctcaagctggagcatataaatcatatgcaccaagcttggtacatatagtctgaatcttgggtcctcttaaggacttagtcaaaatatccgctggctgatcattagaaccaatgaactcagtgacaatctccttggacagaagcttctctcgaatgaaatgacaatcaatctctatatgcttggtcctctcatgga

SEQ ID NO: 303697 - DNA, 431 bp, Glycine max
  unsure (1)..(431): unsure at all n locations
tctcgcanagcttacggtaagatctgggacctagccatgtcataggtctccacagaggccattgcctccctcgcccaatattatgaccagttgttgaggtgcttcacctttggggacttccaactatcacccacggtggaagagtttgaagaaatcctgcgatgccctctgggaggaaggaaaccatacctcttctcgggattctatccctctttagctagaatttctaagatagtccaaatctcgacgcaggaattagaccacagaaagcaagtcgaaaatggggtggttggagtaccaaggaaatgtttggaagcaaaagcaagagtcttggcaggtaaaggcgaatgggccccaatcatggacatcctcacacttttgatcttcggaggagtcctctttccaaatatggatgggttgatggacatccc

SEQ ID NO: 303698 - DNA, 423 bp, Glycine max
atgcttgtgatttggtattcaaatggcatggtcaattggcttcatagagtaagtggtagaatctaattcaaagtctacttatctttggtctagcagggttgtgcgcgcgccttctcatgcttgttataagttgttttcagtgatcaaatctttcaaaagttcagtgatcaggatgttcggagtcatgctttaaggaagggaaaccaagttgttgatgcatgatcaaagtttggcatttctattaatggtatttctataattctttatattttattgtgccttttatttataatgctgtaaaggctaatttaatcttgtagctcttaataatagtttattggtgtggcaatagcccttgtttatatatataaacaagggagaattctttcgtatgactgatttgaacaatttataaaaacacaa

SEQ ID NO: 303699 - DNA, 417 bp, Glycine max
tgttaaggatcttgagatttacatggtgcccagttacattgttagtgtggtacaagggactgagggagcaactcccaaaaatatctagatatatgtttgcttgggtgtttgactaaggttggtgtctcaacaaattgggtcaaccctaacttgatgaggtccaatgtatactttcattatctcaaagaatgcgtgcaaatatgaattacaagatttattgttagagacaattgatagatacattctaatttggatacataaaagtgttcatgcggcatttaccgattaatcacaatgcccatcatgaatcatgatccatgtataattcaaaatagattatgattcactattttcttcacatgatcaatccataagacaataacaatcaaacacttgtgactgtaaaaaggagaaatt

SEQ ID NO: 303700 - DNA, 417 bp, Glycine max
agcttttgttatcggtcatcttccataactctaaggactgcagagcacaaggaagaaaaatatacattattgtcacagtaaacaagaatgggatgtttttagagaaacagaagtgttgaaatgaggatagtttgcagtattacaatgaaatgggtgcagttttttacatgggtctgatgcatgcagtccagaagtaaggtttttgaatccatgcattcattacaacagataatgaacaaaagcttaccgaacttcctccaatcaccaacaaagttgaataacttggatgataaacacaggaatgcaattggctcccagtggagctgaactcatgaatccattctcctcctgaggtcatactccaaaccttcaccagatttggactcacagatgccaaggcatcaccattcccatccc

SEQ ID NO: 303701 - DNA, 390 bp, Glycine max
  unsure (1)..(390): unsure at all n locations
ntagtcaaacagaataatccaaaaatgtcaaagaattgtgtgttgaaaaagcataacaagactttctgtgattggtttaaagatacaatctttgcagatgaaaatgctttagaaactttaagaaaactagctgacgggcctaaaagaaatgttataacttggcaaggatacgacataaacaagtattcattttacacaaaatgggcccagctttgccagactcacagagacctttcttgggacgtatgtaccttgccatttaagttgtttttaaaaaaacattaacttgttataattcattctagcaatttgaaacgctattgttttatttttgcaggatgtgtggaaaaaggcaaaggccatccagaaatagaacactgccccccacgt

SEQ ID NO: 303702 - DNA, 416 bp, Glycine max
  unsure (1)..(416): unsure at all n locations
agcttccttatatggacagcattaattatcattgccaaaatagtgcaagattacaaaggaagcaggcacaattgatcatagcaatataaatcgcccatttttaccattactctatactctntttggcactgtgtttccgttcttgttaataagataagaaaattccttcttcttgattcttctttcactaaacatattaaacacgttaattaaacatgtactcctatacccaactatgaaaaaatatcgtatattatgtgctccaaaacttccttggaaatttcgtanaaaagaagattataatagtaaaaaaaaaaaactccattattagtctagtactacaaacaaaaataatgtaataatagtaaaacaccaatcaggtaatgccaaccattccacacagcattttccacaaa

SEQ ID NO: 303703 - DNA, 400 bp, Glycine max
tgtgtttttcgataggaggaaccagtttgagttggaggatctgcttcgagcttcggcggagatgctcggaaaaggaagcttggggactgtttacagagcggtgctcgatgacagctgcaccgtggctgtgaagagactcaaagacgctaacccctgcgagagaaatgagtttgaacagtacatggatgttgtagggaagctcaagcaccccaacattgttagactcagagcttattattacgctaaagaagacaagcttcttgtctatgattatctgcccaatggaagcttgcatgctcttcttcatggttagttaaactcaaactcgagcgagctctgatgggacatgatccttcatgataaactttaattaatttgataagcttgattgtttatatat

SEQ ID NO: 303704 - DNA, 435 bp, Glycine max
  unsure (1)..(435): unsure at all n locations
agcttgatatagtccttagtaatccanattctatatgtatgattgcattanatgagatgatgtgcanagttgagaattttactttcaattggtgggatttaaacactcataactgagacacttatgtgcttgagagaaacactagccttgtgaggaatgaagcatggtgaatcttctgtgatgcttgtcatacttgctaacctattttatgtccaagtgcatcctttcatgcttttattatgggatcatgaccaatgcgaactagatagttggccattggaaatgatgaaatgttatgcaatcatctcatgtaatgcgattggtacctttgaaaccttgtcatggatctaacttagtgtagttagtttacttttgctagaggacaaacaaagctnntaaattgggggagttggataactgctgtgcatagatata

SEQ ID NO: 303705 - DNA, 437 bp, Glycine max
tcctcgcggccatctgctgcgagaacaaacgtttggaaattagtttacaagataatgcttatcttaacgcaaaaatatcatactaatcactctgatttagaccaaactcatgtaatccatttatgcacacgcgcatgtgtagaaaatgtcctattactcatgtcaacatacaagaacattttccatacacctatatacattctgaacaagaaaacatactttcatgctcaaagtgttgcgtcaaactttacacctaatttatatcctaaacatttgctattacaaactacctacatacatttgaagtacaccataaaaaattttattgtttcactcatatttatttatatgcatattggaaagctaattacatcctgcacacactagcattcaaaaggaaattccatactatcatacattcatttacgaaaataact

SEQ ID NO: 303706 - DNA, 431 bp, Glycine max
agcttgacttgcccactttcatcaaccagtatattagcacacttgatatccttttaaaattcaataatttaattgaaataagttatatccttcagaagtaaaagtaactgtgtatgtaaattcaagacaaaaatcaaggaaccttgatctttcgagcatattgattgaacctggcaagtgcaccggatcgcgcaagtagtataaaacggtaagaaccgagtatcgaactctcagggaacttgtggtacttagtaaagctatatttagtgaataggtgtctagtatgaaaagatacgtgtggactatgaacaggtatgtaaactaattattaaaaaggaaaatcacgtgagaaatgatgtgtaaagacaagtagacaacgcgttggtcttcctattaggtggctgatgttataaggatattctctacttaat

SEQ ID NO: 303707 - DNA, 420 bp, Glycine max
  unsure (1)..(420): unsure at all n locations
ntctagctnttcattggtgtattttgatctccttttggtgctctaaattgtgggaatgtgctcaaatatgtggggcaattttggtttgttttcttgcttgattgggtcgaattgagggtttgtatgagatggccctaggcctataatgcattttgaagcaatgggatatgccacattgtcccagttctcttgctattaatgcctaaacgcgcgcccaccaagtgttcggtgaaatgcctcaatggcattagcgcgtggttttcgtagggaaacaacccatggggtgttttggtttgcacatattttctatttttttgggacatgcattcatttccgaaagggctagagtaattgccccacatatatcctangcctatgaaccaaagtttttatgcaaaagaacacaagagtgggtgctta

SEQ ID NO: 303708 - DNA, 433 bp, Glycine max
  unsure (1)..(433): unsure at all n locations
agcttcagtttcccgaagattagttcttccgaccagtaactccgcaacatttgttttcagtgtctccatcccacctttggatttgtgcttgcacattctaatgacaattcaattaatcaaagaaaagaaatagcagttggtaaaaggagttggattctaaaaacagacagaaattttttgtgatgacacaactgcaggcaaaataaaatttctgaccttatgcttttatcgtatctccatgcagtcacttatctagtaaaagattcatttcttattaatggtgaaaatgatacatcacactcaaaccatgtgaggctttttttgggatgtgaatggagccatgtctttgccttacttngtcaggagaatgggacctttagttcaatctagtgaggtgaaagtaattgtgatggattaccatggaatctctcta

SEQ ID NO: 303709 - DNA, 434 bp, Glycine max
  unsure (1)..(434): unsure at all n locations
tcttatcagatattntaagtagtgcagcctttgcctttgatgtaagaactgggcagtttcccttatttgctaaaacattccagatttatatattttttttggaattgtccatatttgtattttactcaagcttaaatgtacaggcagttgatcatccataccttgtggtatactctcaaagtgcagcatcaagaagtggagttatgacaaataatggcactgttgaacaagtttgtggcatttgccatgagccagttgaagatgttgtggtaagtttttttttttttttttactttttgttaaactgtttttctgattgaattgtttcaattattttcttcgttttcgatctagttatatgtttccgaaaacagttttttagctaattttagtgtgttaagtatctagtcattattgtttcaggttaccacctg

SEQ ID NO: 303710 - DNA, 401 bp, Glycine max
  unsure (1)..(401): unsure at all n locations
ggctgcagcttatattatattataccctgngctattatatatttttgggggttttgtatatattaaagtcttccaataggttgataatagattgtgttgaatcatgccttgtgctcttgctattgttattattatctgtacataactagntgtcgcatatttttttttttaaggttttatttggatatagaaaaaaccatatagagtgtctctgtgatctngtgtattcgtatatgtcataccccatttttgaccccgtttttaattctttttttctcgcttttaaccagaagttcgcattcaatgaatttcgcaggagatttaaatactattntgttcaaacgacgnnttttattattattatttatatttttttattattatttatttatattatatat

SEQ ID NO: 303711 - DNA, 437 bp, Glycine max
  unsure (1)..(437): unsure at all n locations
ntgaacaatatacttgtccttcattntactgtctttgggcttggcggccacgctcaacaaagtattttcgacacctactgtacgttgatttgaccaacgctgttatgggaatgttgcgacaatccttcaaaaccttattgatacattctgagaggttggttgtcatgtggccatatcgacatccttctctatcataagtcatcgtccatttttcttttgaaatgcgatcaatccatgttgctatggctggactcagttcacgaaatttttctagattttgataaaaaatgtgcttgcaaggagtgtangctgcataaaattagttatgaataacaagtttaagtatatatcanagttaaataaacgtgaccatgaaatatgaaatcttacccaatttcttcaacatttctttntgtttggcattattgaatttccga

SEQ ID NO: 303712 - DNA, 411 bp, Glycine max
agcttgtttgaccaaaactaacatacctcggaatcaaaaggctccttgccatacaaaggtatgggggaaagtcattatgtgcagccttacccttgcatatgcatagaggctgtttctggattcggacaaatcaaaacccatgaccgactgatcaccaaggcacaactttaccattgtgccagggcttgcccttttatgtcattttacattcattggctagtttaacaactaattatatcaaacacttttaataaaataaactaactttcagttaaaaattagcattagcttattacctaatcatttccaaacataaactaagcagaacactaaatcctccaaaatctaaaacaaacatatgcccttagcagcttagcctttggaaccaataaacacaatgtgatgaattat

SEQ ID NO: 303713 - DNA, 419 bp, Glycine max
  unsure (1)..(419): unsure at all n locations
tattaagtttcattgctattaaaaaacacaatttctttctcaacttattaagttttatgataaagcttcatccttattaaatgatttcaattttctttctctttttaaaatttccacaaatatcatcatcatcatcactttgatgattattatggtttgtaaatcttttatccacttaactttcaaaataatttaaaaatccatttcttaagaatttggtttctgcaaaaaattagtaatttcttctcacataacacggctgttaattatctattaacatttgacgtttatctcatttatttaatatatgttctagcataaccttctaacggtgatgctcttttgagagttcttccgaatgatggtgaaaggaactagtgaaatgtaccttcaaaagtactntgacagcatataagaat

SEQ ID NO: 303714 - DNA, 427 bp, Glycine max
  unsure (1)..(427): unsure at all n locations
tatcttgtgctaatcanatcactcctacatttcatctctagcatgcatattctttctttacccactcctcacgtttggttttttagggaaaaacaccataactaaacgcgccgcaagggatccctatcgcaccagatccaaatctagaacgatgggtgatcaagaggagacgcacgaacagatgaaagccgacatgtcggctctgaaggaacaaatggcctccatgatggaggccatgttaagtatgaagcagctcatagagaagaacgcggccaccgccgccgctgtcagttcggcttgcgaagcagacccgactctcttggcaactacgcaccatcctccctcanatatagtaggacggngaagggacacgctggggcacgatggcagccctcacctgggatacaaccgagcggcttacccttat

SEQ ID NO: 303715 - DNA, 418 bp, Glycine max
tcaacatcagaccacttccagggtgctggatctacttcacatggacttgatggggcctatgcaagttgaaagccttggaggaaagaggtatgcctatgttgttgtggatgatttctccagatttacctgcgtcaactttatcagagagaaatcagacacctttgaagtattcaaagagttgagtctaagacttcaaagagaaaaagactgtgtcatcaagagaattaggagtgaccatggcagacagtatgaatacagcaagcatactgtattatgcacatccgacggcctttctcatgacatctctgcagccatcacaccacaacacaatggcatagttgaaaggaaaaacaagacttttgcagaagctgctacggtcatgcttcatgccaaagaacttccctataatctctgggct

SEQ ID NO: 303716 - DNA, 420 bp, Glycine max
  unsure (1)..(420): unsure at all n locations
agctttctttttgatggcctcagctattctcttaggatttgtaactaacanatcatctacaagttgaatatcaactgaagcaagcaatgaagcccatgaaccccaatcatcttgatcaaacggatccttaattgacacaatgngaaattctttaacataattnttatatangtgaccaagactctgagtagagtgaacatgagctccatcattnggctgtttcatgaagttcanatcatacttcccatccttagtgtaaaactctgaagctgcaacatccataccaattntaatctgcaccattgttntttatttccagatcagcacaagtgaatattcanattatgcaacagaaataatcanaacttcacccaccttgccagtataaccagccttctcaatggcatccacgagtaaaac

SEQ ID NO: 303717 - DNA, 406 bp, Glycine max
tatgatatttgttaatgtcttcttactaattatggttatttgatctttgtattaatttcttttataataaactcacccctcgcaatttttgtactgtgtggttggtacctgtgatgatcgcgaacctttgttcgtggaagcagaatgacagcagtagagtatgagaagtgagattctttggtggagccaccaggctgacgtgatgaagttgggattattttgggagagagttgtgttttgttaatcaactcctccatagttggttccataattcttttgttgaattgaggatgcaaatcacaaatttaattatatgtatgaacaaatttactttccattatgtgaatgattgagttactatacctatatatatatatatatatatatatatatatatatatagata

SEQ ID NO: 303718 - DNA, 420 bp, Glycine max
  unsure (1)..(420): unsure at all n locations
tatcttgtaacatgagttntatagatatggtttatttatttggttttaatttaagactacatgtgtttgttagttactgtgtgcaatattgtattgacagtgtaaaagtttggtgttactcatttaataaaaatgtcattgttgtattcctaagtaaattcaactgatatttggatgcagtaatgcttatcagccatcaggtttcagttttatgttgaatgtatgtatacttcatgcaatgtttatatttagtgtcttaagaagatgtggtgtaagtcaagtttagtgtgactntgtattanatcctttcttgtggttaaatggtatgacagtgtaatggtgcaacttttaattctgagtcatgataatcaacttctgaggctattatctataacacattcatcaattgcatatgtgata

SEQ ID NO: 303719 - DNA, 403 bp, Glycine max
  unsure (1)..(403): unsure at all n locations
tgtattgcaatcttgttctgtttgttaaaattggtgtctaattnttatatttaattagttttgttgctctaatgatttttttttccaattaaactagtggagagacaagcacatgtctgtccacatttttattttttattatatattaaaaatttatatttacaaaaagatgtgaaaatgaggaggatatgacagactaaatagaaaaatgatagaacgaaattaaaatagtttatatgagttaataaataagtaaatatttgtaataatcaatataaagaatactagcaggcataaattaagaaaataaaaataatttatttcgtattctagcctaatccattacaatgtggaccaattaaaatacggatcacttgtaacanatcttaaacagcatgagctg

SEQ ID NO: 303720 - DNA, 417 bp, Glycine max
  unsure (1)..(417): unsure at all n locations
ttcttcttggttggaaagaataaggaacctatcaacattntacagtatgctgatgatactgtttttgttggagaggctgtgtgggacaacattcatgttattaaggccttattaagaggatatgaattagtttctgggttaaagattaattttgctaaaagtcagtttgggattattggtggtggtgtcaattgggctttggaagcagctaataccctgcactgccgacagctggagtatcctttcctctatttaggcatacctatntgggctaatcccttcagccagctggtgtgggagcctatcatcactagattcaagtcaaaattagccaaatgggctcagaaaatatatccatggctgggaagatactctgataattctgtctcaatgcctccaattatctctctcttttta

SEQ ID NO: 303721 - DNA, 417 bp, Glycine max
  unsure (1)..(417): unsure at all n locations
tatcacaattntntgcaaaattatcaacttcctaatttgaaccaaaattctcaaaatcctacttcattttatccttactttccatcaccaccaccaatgaattttatgcaaaataatcagaccccttgcactgaaaattctcaaacttttccttcaatgccacaaacacaattcttccatgtttcgtaaccctcccaatagttctagtgatccacaaactccttccaatgatgacgttgaaacgcaatttcaacaattttctactcaacttgggctagaaaacatcacattggaacgaggagagtattctacaaaaaaaatattgtgacttttctttnttttattgaagaggatacacatcttattggtttgtgacttaatgtctcaatggatccaattgttggtgatggtcaagca

SEQ ID NO: 303722 - DNA, 359 bp, Glycine max
  unsure (1)..(359): unsure at all n locations
agcttaggagatagaagtggattcaccactggagattgtggatcagctggcactggttcaacccgtgcaggtgtgggctcaggaggagcagcctcgttgggtctcaccaatggaggttgagctccaggccaagctacttgctcaagaaaatgctccataggtatgattggcctgtggtgagccaattctcacaggctgtgcatgataataaattgtgctcggaataagctttgtagcatagggactaaggtttgcgagctttggacatccggtcctatggttgctgacggaggagctggagtagatgatgaagggatgtcatctgctctagccctttntctcgataccatctgtaacta

SEQ ID NO: 303723 - DNA, 425 bp, Glycine max
  unsure (1)..(425): unsure at all n locations
tcatgatgatgaaccaagcaattntgatgatgccaaaagcccaaatgattaattcaagattgattcaagacttcaaaatcgagcatcaagaatccaatccaagattcaagattgaagagaagaaatcaagaagcaacaagtcaagacttcatataggataagtattaaaagattttttcaaattttctcaaattttctaagttaccagagtgattactctttggtaatcgattaacagttggcagtaatcgattactagtgaccagtttggttttcaaaatattttcaaatggtttgcaacgttccaaaatgattttcaaatagtggaatcgattacactatattagtaatcgattaccagtgaatctgaatggtggaattcctatcctattgtgaagagtcacaacttttcataaaatacattg

SEQ ID NO: 303724 - DNA, 416 bp, Glycine max
agcttgtccacaaaaataggttgttgaagtttgtcatttcaatttctcactaagtaaaatggatcattttcaaggtccaacgccttaaaatgatcacctcttaaagtaaaaaagaatcacttgataagaaagaactacgtaggtctgatttcctcaccgcaattgaggaatacgtaggagcaaagggaaacacccttgtcgaccacaaaaagagaaaaatataaaaagggtataaaggatataaagacataaaaaggggaacataaaaaatcaaagtcatgtttgcacattcgattaaaggctgccgtcccttgggacggacgtgtggtgtgctaataccttccctgtgcgtaaatacaactcccgaaccttttcacttaaaagttcgtagatcgcgtctcttcccggttttctga

SEQ ID NO: 303725 - DNA, 416 bp, Glycine max
  unsure (1)..(416): unsure at all n locations
tctcatgcattgctttaacccaattgtcatcttgcattgcatcattaatgtgtttgggttccatatcagaaattagtgcagtatacctttgtgttctaagcaatgatcttgtttgaacatgatctactagatcaccaataatttgactttctagatgatttcttctcatgatgcatctagtgggttcttttacttgttcttgaattcttgttgagtagatgcttgtgtttctagattttgtctggacgagctagttgctatagagacaaggagtgggtagttttattccttgggaacaaagaggatcgagcctcatcatcatcagatagtgagtccacaagcgacactcctatctctcctctccataaacgtgtttcctctacacaancatgcccaccattcatttagagagattc

SEQ ID NO: 303726 - DNA, 421 bp, Glycine max
agcttgataacaataactgcgtttctcttcatttagtgaacggtaaggaataaaacaagtactcaatcctggaaactaatttttctcagaagctatggtagatcaccattaagagaaccatgttccaccatcaaatttaaagttttccatacatttttcaaaagaaatattaagtgcatacacttttcaatctagtcctttgtcaccataaacccagtaaaatattacttccataatctccattaaagctaaaataatagttgataaacaccacattaagcaatcataaaaaccagcattcccacctccaatgctccaaccgttgaaaaatctcttcaaagctctccaaaattatgcacaacttcacagatcaaaaaatccaaaacaaggctaaattatgtaagtgtgaattatttataat

SEQ ID NO: 303727 - DNA, 399 bp, Glycine max
gttcctttgatttgctctgatagggtttctaagcattagagagaaggagaagagattaaagtcttcattttgtactatctttgtgcgattcacttttctctctccatgaatattatttcacaaatcccaacggtggcggtgtgaagaattgaattgccaaccaggtgcctaaatttcacaatgatccaacggttaactagtttgtatcgtacttttattggacaggtttcgagtctctacgggaaaagagaaagctacaatgcgaaggacatttctcttatctccaacatttttttttcacaatttccaacggtgagaatgctcataaatgagttgcgaacctgatgctgaaatatctcgatgatccaacagttaacaagttcgagattgtcaatttac

SEQ ID NO: 303728 - DNA, 407 bp, Glycine max
  unsure (1)..(407): unsure at all n locations
agcttatcggtccctctccgtcgcattcctcanaccagaccaccatccaccagctatcattccctcacattcactgttccttcttcacggcttcaatgctcatcatcgcagtgcgtacttctcttttttacttttcttattatgcttatcttatcttattcttccacctctttctcttctaggtttctttaccagggctaagccagcaaccaacattgaattcaacgatcgccacaggtctcttttatttttcatttaatgcttccgcaacgcaatcttttccatttccctgcccctgattcttttcctcaatgtattgtagtcagcgagctgttaaaactgccttgtggtgaactntcttgtttttcactcaagtttgagtatggtagcttctctatcatgtatgt

SEQ ID NO: 303729 - DNA, 275 bp, Glycine max
  unsure (1)..(275): unsure at all n locations
aaatggctgatacatacatgtgtgtctcattttcactcactttgatcgtgcttcttaacaaggtgtttcatatgtatattttancgcttgcagataaatnttcaatttcggctaaagcttccttcaatgcaataatgaggatgaggtggataataaacaaaatatgcgacatgtaacggagaacatggagtctatgcattgatttaacaccttgttgtaacttattcattaacttaaagtgagtattttcattttgtatgctgatacacgaatga

SEQ ID NO: 303730 - DNA, 313 bp, Glycine max
  unsure (1)..(313): unsure at all n locations
agcttgcagggcttgtgcttgccctccattatgagcatggaggagtttaacgcacaagtggcctggccaggagaccagccttcttcctctggagggggtggtgnctncacagcccacgagcctgtgactgaggagcccacaacaccaacaccatcaccaacagctacagagaaggagactactccagctcagaccccacaaccatctccaccatctgcacctgctcctgaggagacttagccatcagcattggatcttaatgaagaccagccacaggtggagcaggacgtttaaattttctgcactatgaaca

SEQ ID NO: 303731 - DNA, 402 bp, Glycine max
tatagcataaatctcaacacctagaaaatcgtcatcattcaaccagtcctctagtaaggagtatcctatctgcttcaactccagttcagttagctcttctaaagccacactttcttccctttaatcttctagagtctggtctatttcatcaaatccttcctcaccttggcttgcatctatcatttcagatggagtatgattggtcgaattagccaaaatgattgatttttctattatgactggtggatgcttactgaaagctggtccaatgcaatggctacttgactcattgagatttctccttttcccctagctttcatatttgcaatcattgcaagtttctgcttcattttgttcacagccatagcccgttgcaatcttctcttctgtgtgcgagttaat

SEQ ID NO: 303732 - DNA, 399 bp, Glycine max
  unsure (1)..(399): unsure at all n locations
agctnttgtcactccacccatatctggctntgatattaaccagacttaaaaccgctgacaacagcgtcaacaaattcttgcaccctggatacaaaggtttctttgaatcagtttgcaatgtatcatacatcggagcatgtgcttgctgaaaagactcttgtccaaggtcacgaatcatatcctccaagtgatctcccatttctacatcaaatggtttagattggaacccactctacatgtctgttaattcactatgccatatccatgctatataatttctcttaattgcatcacacaacaaatgttcccgtatgtcatcgactttttgccgtctcctgttcaaacaatttatgcatggacaaaaaaacttcccattntcattcggttaacttctttctg

SEQ ID NO: 303733 - DNA, 379 bp, Glycine max
  unsure (1)..(379): unsure at all n locations
atagatactcagcttttatccaggcacattcttggtggtgaagctccttcttccatggcttattccctagtggatggtgcctcccctctcctcttctcctttgccttccactgcatgtccatggtggaaaaccaccattgaaggacctcattgaagctcaaagatccagcctccatagaagatccacaagcaagcttccattaatacccttggggggtaggattgcatcatgatgtgactcctctagctttacacaaagctatgattaatgctggaaatccaagcctagaggagtcatgctgagctataatagagatctggtgaaagatgaggtaacccanattcatgtccatcttcataattattccatagattaact

SEQ ID NO: 303734 - DNA, 399 bp, Glycine max
  unsure (1)..(399): unsure at all n locations
agcttccattttctatgtcctttatctatagctcgtatccattagaaattatgtactttgatgtttggngacctgttccaataaattcaattgatgattttcgttattatttttgtggatcatttctccaagtatgtttggctctatccattgaaattaaaatctgatgtttcaataattttcccaatttttaaaaacttggtcgaaatacaattaaactcccaaatcaaaactctctactttgacaatggaggcgaatttattaaacttcaaccatttttacaaaatcatggcatctctcacatgacaaccccacctcatacccctgaacataatggtatttctaaacgtanacaccgtcacttagttgagactgttcgttgnctactacaccatgca

SEQ ID NO: 303735 - DNA, 380 bp, Glycine max
tcaagcacaacacactttggtgcttgtccaagaactacaccatcttttataatgatatcaaggtcactttaacgctctaaatgttttttttgttgatgaaaattttttatcttctatcttaaatttctatcaacataaaaggaagatggattctgatactggcctttaaataaattccccaattatacctcaccagccctagtgcatcacatgggtctcatgtacgcttctttttcactttcacgggctaagtacatgttcctccacatgacaaattctgtgtaaataagtatgacttatataaatgttaaccattacaagagacaatattagagcacttgtctaaataagaaactacttggcaagccatggcaatctaa

SEQ ID NO: 303736 - DNA, 404 bp, Glycine max
  unsure (1)..(404): unsure at all n locations
agcttttaactgaattagcaacgttccaaatgttttttaatggtgtaatcgataataatatattggtaatcgattaccagtgtatccgaacgttggaattcaaattcaattgtgaagagtcacatcttttcataaaatgcattgtgtaatcgattacatggttatggtaatcaattactagtgacaagttctgaataaaaagtcaagagatgtcactcttccaatggttttctcaagattttctcaaggttataactcttccaatggttttcttgaccagacatgaagagtctataaaagcaagaccttgactttgcattcaaataactttttacaacttttagaatctcttgaacaacttttgagaaatcttganacctttacaactcatctttcttcttctt

SEQ ID NO: 303737 - DNA, 432 bp, Glycine max
  unsure (1)..(432): unsure at all n locations
tgtctttggtttagataggatntatacatgatttaggacttgtaggatccaatttgggcaaaattggatgagggcaagagtgatttcgaaaatctgcactattatgcagaattttgctgttgaaatgtgcagcagaattttgtgcttgtgcagaaaatgcttatgcatggctggttgtggaaagggttgtacatattgggttcttgacgttntctaggagatcccaacggtcaaaatgtagacttatgtactagggacctccagtaaaatgttcgagtcgatccaatggtgattgaattggaacanagagaatgttactgggggtattgtgtanggaaangtgtggtattgggtttgtgttttgggcagagttttctgcttctgccccgtttttcttggattttgatagttcatgatgtgtggatgttgaat

SEQ ID NO: 303738 - DNA, 414 bp, Glycine max
  unsure (1)..(414): unsure at all n locations
agctttgtatttactgtacatcatctatctgatgagagatctcaactagccgatgtttaatagctgtgacgctctacactaggatgctactgtgcaaagagagtanggacaacaaacactttttgtagcatatcttcatagaaatataatttgtcaatgtcacataatgctcaaagttgactttcagcgtacaaatcgaaagaaacattaacattatagaacaaaaagaattgaaaatttcaagacaagataatttagatcttctcttttgtgtgctaaggcacaagatgtttactanacctatggacgctactctttaatgattgtttttagtacttgaggatcgagtaattattccattgcttttgtgttgcangtcaagtgctaaaacatttgtctttttaggatttgacg

SEQ ID NO: 303739 - DNA, 445 bp, Glycine max
  unsure (1)..(445): unsure at all n locations
tatgctcgtcaaaaattcacatggaattacgataacttgatattcattatataattggcgtatatctatacgctacaactccgatcagataactctttaaagcacacttgttccctatagacatacattaaattgataagatattctttattgataggaataaaaaaatatattatttaaaatttataataactcacctatcaatttatcatatttgcatatgtacattaattatagaccgtaaaacaccaagtatatatggcctaagaaaatgcttcatgtcatatattaaataaatcttttcatacctgaaaaatagatcattcttaaattactacctacgaattcattntttgtcaaatacctacttgaaaaaaaaatttaatccttcggntaagtgatgacgtgacagaataccacatcattacgtccaatcactgacact

SEQ ID NO: 303740 - DNA, 391 bp, Glycine max
  unsure (1)..(391): unsure at all n locations
agctntgtggatttggtcttcgccggcgaaaggatcgaagtgggtctaanaagaggaaaatctgatcatcctgctttgataaatgcaaaaaaaaaaaaaaaactgaggcaaataaagaggatgagaaggagggagaaacccatgctgtgatagccattcctatacggccaagtttcccaccaacccaacaatgtcattactcaaccaatagcaacccttctccttacccaccacccagttatccacaaaggccatccctaaatcaaccacaaaacccacctaccacacaactcanacgcaaacggtgcttatcgtggaggagttccggngcattccattgagcattgtatggccctgaagcataaggtgcanagtctaattgatgcgggat

SEQ ID NO: 303741 - DNA, 379 bp, Glycine max
  unsure (1)..(379): unsure at all n locations
ttggctggaggtggattctcttttagtcctcaaggcttttaatgttatcagtgtggctccttaggatttaagaaatgtctggatgaatactgtattctattgtggcccanatggagtttcgtgtctcccatattttccgagatagtaatgtatgcattgatcatttggctaactatggtgtaaaattgctctattatgtgggaagataaacttttgatttggatgaagtgtacaaggggagatacttggtgttgcaaggacagaaaaataaagataacatttgctatttggatggacaagcctttgagagaaaccatgataacaaagtgaagaagaaaatgaagttttctaatattgtagaagtgttgggagatacttc

SEQ ID NO: 303742 - DNA, 374 bp, Glycine max
agcttgcctcatagaggtccaggaaggacaaggcggccgaaggaactagttccgccccggagtacgacagtcaccgctttaggagcgttgtacatcagcagcgcttcgaagccatcaagggatggtcgtttctccgggagcgacgcgtccagctcagggacgacgagtatactgatttccaggaggaaatatggcgccggcggtgggcaccactggttactcccatggccaagtttgatccagaaatagtccttgagttttacgccaatgcttggccaacagaggaaggcgtgcgtgacatgaggtcctgggttatgggtcagtggatcccgttcgatgccgacgctatcagccagctcctgggatatccgatg

SEQ ID NO: 303743 - DNA, 233 bp, Glycine max
  unsure (1)..(233): unsure at all n locations
tgcacattactgctntatagaagaggagcaagatggtaatccgtggtaccatgacatcaagcggtacatagagtgtaaggagtatccacaaggggcttctggcaacgacaagaggatgttgcagaggttggaaactagtttctttctaagtgggggtatcatgatgtagctccattggagcttgttggccttggatcttcttcatcaatggagtcctttgcttcttgaatttt

SEQ ID NO: 303744 - DNA, 424 bp, Glycine max
agcttgtatataggagaccttcaatcctagaacgtaacgtggcagacaaaagtgggcagttaacttgaatgaccattattttcaatgcggaaagtattatgttcttcactatccatgttcacacattattgctgcttgtggttacgtgaacatgaattacttccaatatgtagatgttgtttacacaaatgagcacatcctaaaagcttattccgcgcaatggtggcctcttgtgaatgaagcggttattcctccttctgatgagcaatggacacttatccctgatccaagtacaattcgtgcgaaaggtcggtcaaaatcaacaaggataaggaatgagatggattggctggaaccatctgagcaccgacaaaaatgtagtatatgtggaagagaacgacacaacatacgtcgatgtccaatg

SEQ ID NO: 303745 - DNA, 389 bp, Glycine max
  unsure (1)..(389): unsure at all n locations
tgtaagaagtatagcaatataggagattgttcttggttgattgataaggacttagattntaatcatgggttaaggagttgtacaacagatggagatatattatacttagtgagggatgctttggaaaatgagaatgagataaacgtttattttcataatgaagtagatccaattttagaagaagattcacagatgttgtacttggaatgtcatccaattccagaagttgttgataatgaggatgatttagatgatgtacctattcctggccatgagtaagggaagttttaattcatctatacttggtccaacatggataccataattntgaataagtttggaatttaatgtttatgattaattcatataatttatttgtacttgatcac

SEQ ID NO: 303746 - DNA, 267 bp, Glycine max
  unsure (1)..(267): unsure at all n locations
agcttgtgctcttgcctcactcaccgnctttttggttgcatttctagctatcttatacttatcccaagtttcacaatttctacatctagaccactccttgaaacactccttttttactctaactttgctctgaacattttcattccaccaccacgattctttacccctaggtccaaaacctctagattcacccaacgtctctttagccactttaataatctgttatctcccaaattttgacatgcgcgtgaaaagttatgagcattc

SEQ ID NO: 303747 - DNA, 189 bp, Glycine max
tgatattgcacaacggaagcactcgagacatgcgaatgtgtcattactattcactcggatgtgcgattcgcgggcataactcatctagatgctcggaattgtgcatcggaagctctcgagaaagtcgaacggtcataacttttcacacggatgtgcgaattctgggcataatatatagagacgctcgat

SEQ ID NO: 303748 - DNA, 169 bp, Glycine max
  unsure (1)..(169): unsure at all n locations
cggctccatangacggaagaaatgtctggatgaatactgtattctatagcggcccaaatggagtttcgtgtctcccatattttccgagatagtaatgcatgcaccgatcatttggctaaccatggtgtagaattgctctattatgtgggaagataaactctgaatctgg

SEQ ID NO: 303749 - DNA, 400 bp, Glycine max
  unsure (1)..(400): unsure at all n locations
agctntgacccctttgccaaggcacccatatttgcactccttgtagaacccatccaagtagaacccaacttctctagtccaatggtcaaaagatgttagcatttgatgcccaagtaaaagtttccttccctcaaaccttatcaatctcattctttctcacaacaagttacatatggtaggaggaatcctaaaacaaatgtatatagcaaattagcactagcctatcccctaggtctgcatatgaatataactactgatataaagatgacatcggatcanacatgcctcagactacccatctgtaatgaagtcaaaaagaaaaatttcatgttttacttgaacaccaaaatgcctaacagagaacanaaggtccaattagtcaactatcctaaacactaaa

SEQ ID NO: 303750 - DNA, 378 bp, Glycine max
  unsure (1)..(378): unsure at all n locations
ntntcctattatggaaaattccgctttgttagctccgttaggattctaggatgtgtctcaatctagtatggctaatcattctccatgtatacttgttctccattctcctttaccatggcaagcctttgtgaaataacttcgatgaanagaaaaaggtcttggatcgagtggcctcaaaataattaagaagggggggttgaattaattattcataaacctttactaattaaaaattactcttttaaggcttttactaaattgctaagagaatgaggagtagaagagaaacttaacagaaagtaaaagcggaaattacatgcacagcagaaagtaaaagagtatggaagaaagagacaaacacacaagagtttttatact

SEQ ID NO: 303751 - DNA, 425 bp, Glycine max
  unsure (1)..(425): unsure at all n locations
agctntggttatngattgaccccaggcctaaaccagcaaccactccatcttgcactgcagtcctgtaagctttggttaaggattgattgtattgagctatagcttgactctcgcctgtaaatgatgcaacctgcattggaggaatgtgtatcttttatattctactgtctacaaacatgtaaaagaacaagattgacaagttccattatgaagattggcatacttgtcgaattgaatcaattgtgcgctctactacagttgctgcttcagaataagctgcttgtccatgggatggcaactttgcaaaagtaaagctcatcatggaaccagagattaccagaggtggaatacaagatagaaggacaagggttagaagccaacccttgatgaatgctatgactaaacgtcctaaaaaacatgccaca

SEQ ID NO: 303752 - DNA, 369 bp, Glycine max
tgtaattggccttgttgacacatgtgaggatcatgtggacctttgttttgtaattgtccatgtggatttgcatgaaatatagtatgtgattatcaatttggggaaatgggattaaggtttacgaagaatgaaattggttcttcttatttttgtttttgtggcagttaaaagttgccagtatctaaatattataaatggtgttaactttaaattgatttgaatcaatttaaatagataaaggattaaaatgaattttttaaaagataaataaataaattaaatctaaaaataaggtaaagaaaaaaaaactatatgacaattcttaatttaggttcccaacactaataaattaagagcatatttggattg

SEQ ID NO: 303753 - DNA, 386 bp, Glycine max
  unsure (1)..(386): unsure at all n locations
agcttgaaattgaacaacggaagctctcgagaaaatcgagtggtcataaattntcacacagatgtccgattcggggaaataatatatcgagacgcacgaaattgaacaacggaagctctcgagaaatttgaatggtcataacatttcactcggatgttcgatccggggacataatttatcgagacgctcgaaattgaacaaccgaagctctcgacaaattagaatggtcgtaacttttcacgcgaatgttcgattcggggacataactcatctagacgctcgaaattgaacaacggaagctctcgagaaattcgaatggtcataaagtttcacacggatggtcgatttcgggacataatatatcaagacaatcgaaattgaacaac

SEQ ID NO: 303754 - DNA, 377 bp, Glycine max
  unsure (1)..(377): unsure at all n locations
tgccgccacggagttntccgactatgctcttgtgtggtggatctagctacaaaaggagagagcaaganatgaagagccaatggttgatacatggacggagatgaaaaagatcatgaggaagcggtatgttccggctagttactcaagggacttgaaattcaagctccaaaaactaacccaaggcaacaagggggttgaggagtatttcaaggaaatggatgtgctcatgattcaagcaaatattgaagaagatgaggaggtaactatggctcgatttcttaatggtttgactaatgatatccgtgatatntgtgagctgcacgagtttgttgaaatggatgattngcttcacaaagcaatcccagtggagcaacaat

SEQ ID NO: 303755 - DNA, 413 bp, Glycine max
agaggacgtgagaagacatgctctatgatgcatcatgacacgtcctatagtaggctcttcagaatgcattgttatgcgtttatgatggttagaatagctgatcatgaataggccacgaaaatgatttgaataggtacaacctctataactactcgacaaccatcgtgagcgttacgacctctgatctccattcgaaacttactattggggagcgcatacccaaccattgtcatcgaccacaccaaacattgttgcgaaacgatgagactgtacacatattcctgcccggcaatttaagcatagaccagtcatatccttcgacaaactctgacacccttggaagtgatacatcgtttgatgattactcacacctatagttgtaatacaataacagatcatcgttatcgataact

SEQ ID NO: 303756 - DNA, 284 bp, Glycine max
actagtgacgctcttgagcatcttgtatattagcgagctctgtcactcttacgagttaaacagtatcgctggcacaatttgcactgaacttatatgttcaactgctagcgactccacctattacgggactgactctgacattagagtcacaagtaattgtagtgagaatttgctcatagcctatgaaatcaataacaagcatgggaagatcttacggtactgaatcgcacatacgagtcagaacttattgtcattggtaatttctatgagcttctgatttccat

SEQ ID NO: 303757 - DNA, 203 bp, Glycine max
agcttgtcgtctatctaaactaagcaagcagggctgcttcctccagaagcaacagactactggaggaatcgtctgtgaggcccaagtgggcatgattgctatttgcacccccatttttactaaatgcacccccttctattattttggtaattctttttccgtaacgataccaaacttgccgactttcgtaacgatacttattt

SEQ ID NO: 303758 - DNA, 327 bp, Glycine max
  unsure (1)..(327): unsure at all n locations
gagcttgngcatccctttggtatggcntttgatacgccagcggtgaccgtgctccacgcataatcttnccaccattctctatgagtgactatttcatgatacgcttaatcacgtacgatggatgccgtgccggtagaacacaacagctttactactttaatgctgactcggggggacacatcattatagacctatttatcatattacttacgcttatctgcttaatgtatggatctcgcaannannccaccaccnagcatacattactcttttctttgtcattattgacgagcattactatttctttgttaccacaccacaattagt

SEQ ID NO: 303759 - DNA, 466 bp, Glycine max
  unsure (1)..(466): unsure at all n locations
ntttaatcgatacattgcgttagctataccagactcaatcttttgccctatcttgtaacaccattgtaaattgtgcacacgacgatattttgctatatgatatctactcagcanagtggatttcacgcaatacataggtaagaggtggctgactctacaccgcgtgcgatcctgagcacctgcactgattagcgtgctacaaccgagatgcggacattctatcgttactcgctatgagagatgttcgatggaaagaaaacacgactcggagggtgcaacgctattacgacctgttgatcacggaatatgtggacgttgccacataaggacgatatataggagtggagaagtgattttggaaacgtattgcagtatgaatgccaagaaatactccattgagtccttactgatagggaaccctttaaagtggagagctcacatttgatgactagatgaacactgtcct

SEQ ID NO: 303760 - DNA, 495 bp, Glycine max
  unsure (1)..(495): unsure at all n locations
attattgatgacatcgntactacanggcgagttgatctcagctcgctgcgagccgatacagtaaanctgcctgcggcatgcagcattgttatggaagacagtgagaaaacaacaagtggagagtattgattcgcatgacttcagatcatgagcaataatatattgttaggaacaaaagccaaggacatactctgttatatatgatggcggacaagagcacctgcgtcatttggttaatgtgacgtctaaatgcgtcaaaactatatggattgaaccctcgcacttattttcatgtcatgatgagtgaatgcattcacttgagggctctatactgatctcagatgatacatacccgcatgtcctatgtcactcaatctatttaaatattggacgatcactgcctttcacatcgctgatgaagtgagcaacattatgcactaggctagatgctgaccacgggaaggctaagacattcgttcacaatacagcaccacg

SEQ ID NO: 303761 - DNA, 375 bp, Glycine max
  unsure (1)..(375): unsure at all n locations
tgtcatcggcgcggttgacacatgtgatgatgcatgggaccttggcttgtaattgagatagcagaatatgatgagccaatggttgatacatggacggagatgaaaaagatcatgaggaagcggtatgttccggctagttactcaagggacttgaaattcaagctccaaaaactaacccgaggcaacaagggggttgaggagtatttcaaggaaatggatgtgctcatgattcaagcaaatattgaagatgatgatgatgtaactatggctcgatttcttaatggntcgactaatgatatccgagatattgatgagctgcatgagtttgttgaaatggatgatctgcttcacaaagcaatccaagtggagcaacaa

SEQ ID NO: 303762 - DNA, 196 bp, Glycine max
atacaatacacaagctagccgccacggagtttgccgactatgctcttgcgtggtggatcttgcttctaattgagagagcacgacatgaagagccaatgagtgatacatggactgacaagaactagatcatgaggaaccggtatgtatcggatagttactcaagggacttgaaatttaagctcctaaaactaaccca

SEQ ID NO: 303763 - DNA, 418 bp, Glycine max
  unsure (1)..(418): unsure at all n locations
agcttccatctatgaagaaattcaagaggatgttcaaagagattcaaaggatgtaaaagattgtaattaatgtcttttaaatgcaagttatggtcttgcttttatagactcttcatgtctggtcaagaaaatcattagaagagttataacctttagaaaaacttgaaaaccattggaagtgttacatcttttgatttttattcaaaacttatcattggtaatcgattaccaaatcattgtaatcgattacacaaagcatttttgtgaaaggatgtgactcttcacattttcatgtctggtcaataaaatcattagaagagttataacctttagaaaaacttgaaaaccattggaagtgtacatcttttgattttattcaaacttatattggaatcgataccnatcattgaatcgatac

SEQ ID NO: 303764 - DNA, 398 bp, Glycine max
  unsure (1)..(398): unsure at all n locations
gttggtgcatagaagaagaagaagttcagagagattcaaagcttgtaaaggattgatcaaatgaatgtgaaaagtatattgaaaatcaaatcaaagccttacttttatagactcttcatgtctggccaagaagaccatttagaagagttataacttttagaataacttaaaaccaatttgaaaaagtcaaaaaccttttgaagagttacatattttttatttattcagagacaaacactggtaatcgattaccatattagtgtaatcgattacacagagcttttgtgtgaaaagatgtgactcttcatatttgaatttgaaattcaacgttcaaaggcactggtaatcgattaccaaaacattggaattgattacagctntgtgaaaataattggaac

SEQ ID NO: 303765 - DNA, 415 bp, Glycine max
  unsure (1)..(415): unsure at all n locations
agcttgccgtctagctcgcctaggcaagcaaggttgcttcctccagaagcaacagccttctggaggaatcttttggagggcccaagtgggcatgattgctatttgcacccccatttttactaaatgcacccccttctatttttttggtaattctttttccgtaacgttacgaaacttcacgactttcgtaacgatacttatttccttccgcaaggttacgaatccttacggattatgtattttctcttttttagcttttgaagaagttacggaaacttacggattgcgcaaaaacacctcttttcgacttccgccacattacggaattacacggatcgcgcaagcctgcttcctttagatttctgagacgtctcgggacttcatttattgtgcaacanaggacgccaagtatctc

SEQ ID NO: 303766 - DNA, 426 bp, Glycine max
  unsure (1)..(426): unsure at all n locations
tctggtgactgggaagcacgttattctgttgttttccagaatcgtttccttcgccaagtatgtgtatatgtgtattatattcgntgntctggttgttgtttgtattacgttntgtgcagaagaaaaaagaagaagtagagatgagagtcgtcatcacggaaagggcaggacggacgaaatcagtgntctatctttgctttcctcttatcatagatgagaggtaagtaaagaggggcaactgtcataccctaatttcgtccggngattattacttgatgacatgcaacctttggttagccgctttgagatacttggcgtccttttgtgcacgataaatgaagtcccgagacgtctcagaaatctaaaggaagcaagcttgcgcgatccatganattccgtaatgtggcggaaattgaaaagaggtgt

SEQ ID NO: 303767 - DNA, 410 bp, Glycine max
agctttcgtcttgttacagctaaagggttaataatgttaatcatgcacaatgaaagctacgttagaaaagctagttgaattattatttcatgaaacgcttcagcatgtacatggctgctgtgccagtaaaatacaacaactttacgactttaaagttgtaactgaagcacacctaattaaagacctatataaacatattaattaccttatctgtttaatgttttgatctaataattagctcaacacagatcaaacatagtcctcccctttgtcattcttgacgatctttcccttcccattattattcccacaaacaaagtctaggttataaagaatcggtaacattgccacagaagacaagaaaaccaacacaggcccaaagatccaaagcagaagagggagtgctgagt

SEQ ID NO: 303768 - DNA, 440 bp, Glycine max
  unsure (1)..(440): unsure at all n locations
tgtgatgacgacataagttcaagtcaggaatatatatatatatatatatatatatagcatgttgagagacaaatgtggngaaaagttaggctggttcttgaagaatccatgccatatggatgctacagagtgaaagggacttgttttagtgtagagagatgaagaaagttctacgttaatttggaatatgatttggtgtttggaaggagaaccgtaaaagagggtgcaagagttttccaacgtgttccagaggcttcatgtgttactttgtcaacatattggtcatattcatcggactacagcttttctctttaagtaatggtttgggcaatttcacactaagttgggattaagtccaatatcaataccatacctactagntacgttntcggctattgcttcctgcacctcttttatggtttctggaatggtcaatcccg

SEQ ID NO: 303769 - DNA, 393 bp, Glycine max
  unsure (1)..(393): unsure at all n locations
agcttctctctctaactctcactctcacttagagaaggggggaacactaataggcacgcatgctttgcattggtgaaaacggataacaaaggattacttctttgtgtattacccatgtaaaaaagtcaactttttgatgatacattcatccaaaatttcattgacaatttcctccaactacgtcagcaacaaacataggaaattttttgttgacaaatccgtccacagatgccacgcagaacattccatttgctttgacagagatatttaatgtttggactaaattgtcgcactttccttaaatccaaggacaattnttttttttatcttttcagtactatagtgttaactcattacaaattcanggattgaagtgactaatttatacttaat

SEQ ID NO: 303770 - DNA, 395 bp, Glycine max
atttggagtagatacatgggaccaactcattttatttcataaaagaaatcatatctagtcaaggtctgagagaccatacaagtttcctaacgatttctaattatgtgggccattaagtctatcatatgctgacaatagccgagaagcccatgaatctcttcgggggcggagtaggtgtctgccatcgccttggccttagctaacaatcggagaaggtcttgactcccgctcaaggtaagagcaaaccgatccatccacatggttgcctcttggtgtaaagagtcgatcacccttactctagcctctttttccgcatatacttgggcatactcatacgcgattctatgctcgtgggccgtggctagacccaactcttcttggtacttggcgatgat

SEQ ID NO: 303771 - DNA, 384 bp, Glycine max
  unsure (1)..(384): unsure at all n locations
agctttcaatgtacaaacaattagtatatacaactcttatagagacagacacaatacagcagtcacaggcattgaactactccattgtgattgcatggatcatgagtatataagtatcatcacatattcacataaatctcatttatgattacttattatgcacatacctgtcttccatccaagcaacactgtacagatcacccaagcaggttgaatattctgggggaggactaggatactccccagggcaatatgttccccaactactttcttctgcattggaagctgtggttgcataaatattgatatcttcgggaagaagaccttcaaagatactcccagattcacatgcctncagataaaatacctgcattaccatcatgt

SEQ ID NO: 303772 - DNA, 420 bp, Glycine max
  unsure (1)..(420): unsure at all n locations
ntgcggngtgagcttacccgcatgtctggctctagtcacggtcgacatctcccactttcatatcttttgcttcgtagccatgacccacatcttccaaccatcaccacctccaattggtagccatgactaatatatttccaccatcaatatctttgtttagtaaaagtgttatgggatgggttacgataagtgtgcttgtgtccttaccctgngtttgtaaacttatccctaaccaaattaatacccaacaatacaggggacaagattgggtggactagactntgtagtattatatatatatatataatattntataaactattcttttaagtattgattaattaacanaattgtgtcacattatataaggaaaaaatattatatataaatatttattaataacataaacactatgtaata

SEQ ID NO: 303773 - DNA, 448 bp, Glycine max
  unsure (1)..(448): unsure at all n locations
tagtaagaagatttcctagtttatcactaacatattactatttgtgttaaccaatctatatacaccattgctaacttagaaattggtctgaaaatcagcttcctagaagttataaatattttaaaattaaaaaaaatggtataatcatataaatatgaactaaaaaaacatattgtctccattttgaaataattatagataaatgttaacaacacactattacttgatgaatttcctacaacttttaataacaataataaaaaaaagagctggcctaagctttctagtggaactcaagaaattcacctattaataaagagcttgatgaacagtgtgcatganagaatggttatcatataagatttcactgaaggattaagaacaatcaatgaatactatcagttntaaagaaaacattactgaagtagtagtccattgaactatatta

SEQ ID NO: 303774 - DNA, 361 bp, Glycine max
agcttttgatgcactagttcgaaggtatgtatcaacctggtcttgaaaatcaagatctcatgagccctttcaagaatggatgataaatgataattctgaattgggaaacataatattgcatatcatgactacgtgaatggcttcccatggccaccaagatcatacacttgcagcttttgtacaaaggagtttaagtctgctcatgcacttggtggacacatgaatgttcataggacggatagaccaaggttgaggcagtcatcaccctcaattcatgaagatcaaggacaagctgctggacctatatagcacaaccttaatcttgaccctaacaacaactcactctcatgatgatgggtgc

SEQ ID NO: 303775 - DNA, 370 bp, Glycine max
  unsure (1)..(370): unsure at all n locations
tgtgatagtcataatgtagaccttctctagaaggaggttccttttactcagggagcgtttttgcgaacaacttatatgtacatagtgaataagtacttatcatataagcactaacgtataagctatgttataagttattcagccagatatctgagatgagatgaatgtggcttatggacacatcataagctaattttataagttctctcaaacacttacagaagtgcctgtgttataagttcaaataggctatcaataagcattttccaatgcatattataatttgacctttnttgagtggatcaattacaggaaggccagctccactgtggaggaggttgctagaacatgaatcataactatgcttaaa

SEQ ID NO: 303776 - DNA, 262 bp, Glycine max
agcttaacaatgttctgtcgtcgagagtcagacgaggcgtctacctcactcttgacggtctttatactatccacgtactattctgtttgatcacactgcatccttctaacagctaaaatgtgacctcacttcatgtgtgctttatatacattgcccaacgctccttacgcaatgcaatactgtgtggtaaagtgattgcgagcttcgattatgtctccatacacaactctcccattgaagtaccaacatgaaaatggatatg

SEQ ID NO: 303777 - DNA, 316 bp, Glycine max
tgatggctagtgtaaacatctactatacatacaaggcaggattgatatcgcacgtgacgctactggaggaacactcatatgttgaggtgtgcatagcaggcattacattcgttgctatggatgtatgtactcctggactacgttatagctgggagacatacagcttttcacccacccttccaccattcaaaacgctgtttagagtattttctacacctgagtttagtataactatatatacttgaataccacacccatttatagagcgttctttagagcctgcatgatgatgtatattatcagttacgaaagatga

SEQ ID NO: 303778 - DNA, 418 bp, Glycine max
  unsure (1)..(418): unsure at all n locations
caagacttattccctagtggatggcgcctcctctccctttntctnctttatcttctgctacaactctatgggtgaaaatcaccatttgaggaccttagtgaagctcaaagatccagcctcagtagaagcttctcaagcaagcttccatcangaatgtgaagtgatacttacaagaaagcaaantacaganggccttgtgggtgatgagtaatgganggtgtagtaaaagatgtaagtgatgataaggaagtgtangagagcgagaagtggctaaaaataaagagaaaaaaaaatgagtgggtgaaatgtagaanananaaatgagaaaagccaagaaaaagagaaatagttntaaagagagagttgatgaggtcttagcttttangactagagtcaaataacgagagaagcaaagagg

SEQ ID NO: 303779 - DNA, 412 bp, Glycine max
  unsure (1)..(412): unsure at all n locations
gacactataaatactcagcttattaagaggcttcctcaagaagcttcctcgtggcttctttgtataagctttctcaagaggcttctttgataagttagatccttatctagccacacctctctattaactaaattaacctccttaaaaataattacagataaaaataacgcaacaaataatcaaacatcaaacataattactaataatatatagatatatatcagggtgttacaaaccacatttcagtagcgtcacttttgcatcctgcacccaccaatatacttgcacatccacaccattttggataatttgaaaantttcctttcgtgaatctgttacgaattatgaatgtataaaatcgttacgaatttgtcattggtatgcgtcaatataatttttttttggttatttc

SEQ ID NO: 303780 - DNA, 422 bp, Glycine max
  unsure (1)..(422): unsure at all n locations
agcttttggtgggacacatgtcaacacctcctanaaaaaactctctccataacttctttataatttttcttcaaatttatattaaatattttttgtgtaatattatattatgatagatttatataattactaataaaccattaaaaataattataatttatttaactaatttttttactttaaaattctacaaaattatttttatttagaaatcatataaaaataattgtaaacagctccataaataaatattttgttggtaaatatttatattatatggnttatatttttatactaaaaattagtttaaatatagttaatattttataataatttgactctatgtttagaatttttttattaaatatattttaaataaaataaaaataattttgtggctataatcaaatatattntatctg

SEQ ID NO: 303781 - DNA, 423 bp, Glycine max
  unsure (1)..(423): unsure at all n locations
tgaaagctaggcaattgagttagagttggtaattnttttctacacaaaaacaggttataatgtccatttatatcatgtcagtaggtcctttccagatttttttgctgaagcattatccctttgctagatatctatgagacatatatctgggttgttatcaatgcatagtagttcttttaatatatatatatatatatatataattggaattgagcctaaccaactccctttcagggggccccagggactgggaagactcagaccatacttgggattctaagtaccattttgcatgctactcctacaagaatgcattcaaagtaagtgtaatatttttatatattnttgtagncttctatgtctaanaacttcgtaccccattgcccagaggctcttcgctatgcgaacgtatgggggagggat

SEQ ID NO: 303782 - DNA, 419 bp, Glycine max
  unsure (1)..(419): unsure at all n locations
agcttcatgtagatgaaccaagcaattntgatgatgccaaaagcctaagtgattgattcaagacttcaagatcaagcatcaagaatcaaatccaagattcaagcattcaagagaagaaatcaagaagcaataagtcaagacttcatatatgataagtattaaaagagattttcaaaaaccaaatagcacagttttgttttacaaaagaattttctcaaattctctaaagttaccagagtgattattctctggtaatcgattaccagtgaccagtttagttttcagaatattttcaaatgggttgcaactttccaaataattgtcacatagtgttatagattacactatattaggtatcgattacaagtgaatctgaacgttggaatgtatatccaagtgtgaagagtcacaacttttca

SEQ ID NO: 303783 - DNA, 427 bp, Glycine max
tcaaacctctcacaaaggagaagacaaagtaaagaatgtgaaatctaaactgatgaatgcaatacaacagtcgcaaatagaaatagttgttttctccaaaagctatactgaatctactttgtgtcttgaggagcttgaaaaaatcattgaatgcaataaattttaaggccaagtacttgtgcccatattttatgatgttgacccatcagatgtacgccatcagaagggtgcttttggaagagcattaaaagaacttgcacaaaacaaatattcaagagaccatgcggcataagtgtttgtgatgtggagccacacactcagcaaaactacagacttttggtgttgggatgcaagagagcaatgttgttagactcgtgattctacgtagaatcgtgaagacttcgtaaactcgacttcgagaatcgaa

SEQ ID NO: 303784 - DNA, 426 bp, Glycine max
agctttatatattatgaggagcaggccacataatattttggtgtgtatgatgtatatatactacatacacaacgtgtacagtggaaatcatacaagtgctgagattctgatcagaaagagaatagtttgttagaatacttgggaaactgaaccttagctctactcagaaaggggaaatcctttgtgaataggaaaccctttgaaggataatctcaactttgtttctttgcaattcaagaaatactatcaaagcatatttgttccctttcattcccttagcattatgctattctgctactaactttaactgcatttaaagcttgctcataactaacaaagtttatttgtttagattgattcattgagagcccttcaatcatcaaagctcattcccatgatctttcgttaccacttcaacaaccattt

SEQ ID NO: 303785 - DNA, 326 bp, Glycine max
  unsure (1)..(326): unsure at all n locations
tggttcgaggtacttacccgttgaagatcgaagaacgatgaagaacgaatgaagaacgtcgaagaacggtcgaaaccttcacgaaattcttcacggaaaacgttacggaaacgtttcggaagcgcctcggcttagatttttttcacggaaacaatttttccaagcaaattcgaaagagagagaagtgccaaaggggctgaaccccttccttcttcacttcctcccctatttatagcaaaataagggaggtggttgccgcccagctcgcccaggcgagccangttgcttcctccagaagcaacagccttctggaggaatcttctgga

SEQ ID NO: 303786 - DNA, 476 bp, Glycine max
  unsure (1)..(476): unsure at all n locations
tgtgatgcctcgttancttacctatactatanaatactcaagctatatgcgtgataacaggcgcactcatgggccttggatgttaatctctcgtgcgtgagaggttgtgtgatgagctagatacgtacatagccacaccgctctaataactaaagcaacctccttgaaagctaatacacaggatgataacgcgacccataacctacagcagacataactactaatgagatagtgatatatatccgggtgttacaaaccgaacttcactagcgtgacttttgcattctgcacccaccgatatacttgctcatacacaccattttggataatttgaataatttaccttcgcgaatctcggaccaaatatgaatgtgtaaaaaccgcacgaagttgtcatttgcatgcgcccacataacatgtttgtcggtaactctactacattgagcgcgcatatatacaaactgagctcatgtgcg

SEQ ID NO: 303787 - DNA, 483 bp, Glycine max
tgttgtacctcatgcctacatatacataaataccagacgtcaactggtcgcgaggagcatgcgaacccaacaggtttttattcatatgtatgaaccagacccacgggttggcggttagagctcctgtgttgacacaccatacagacctttgtccttccatgcaggagagcgtgcaaaagaacagactgcaacttatgtctgaggcatgtacctttgaccacctttaactaatgagaacaatcaaacacagtccagctattatgacctttccagcagaagatacaaccctggatggaggaatcaccctaacctcacatggtccagccctcagcaacaacagcagcagcctgctctcttcttacaaaacgctgcttgccgaagcggagcatacaatccttggccgatcaaacaacagcaacaaccccagagacagtcatcagctgacgccgctccacaaacttccctcgaagaacttgtgaagcg

SEQ ID NO: 303788 - DNA, 414 bp, Glycine max
  unsure (1)..(414): unsure at all n locations
agcttgaaggcaaactggatgcgttggtcaacttggtaacccagctggccttgaatcagaaatctgtacctgtcgcaagggtttgtggtttgtgctcctctgctgaccaccatacagacctttgcccttccatgcagcaacctggagcaattgagcaacctgaagcttatgctgcaaatatttacaatagacctcctcaacctcagcagcaaaatcaaccacagcagagcaattatgacctttccagcaacagatacaaccctggatggaggaatcaccctaacctcagatggtccagccctcagcaacaacaacagcagcctgcttcttccttccaaaatgctgctggcccaagcagaccatacattcctncaccaatccaacaacagcaacaacccaagaaacaaccaacag

SEQ ID NO: 303789 - DNA, 416 bp, Glycine max
  unsure (1)..(416): unsure at all n locations
tgccacccaactcgcccaggcgagcaaggtggcttcctccagaagcaaccgtcttctggaggaatcttctggagggcccaagtgggtctggttgctatttgcacccccatttttactaaatacaccccaactttttttttgtgcttcttttttcgtaaagttacggaaacttatgaatttcgtaacgatacttgtttttttttttccgtaatgttacggaaccttgcggatttcataatcantccctttttgacttacggaacgttacggaacctcacgaattctgcaacgatgcttcctttttgattttcggtatgtcacggaaccttacggattgtgcatcaatactttcttttgatttccgacatgtcccggaacttcacanaatgcctaatgatgggtgccaagcaccacac

SEQ ID NO: 303790 - DNA, 423 bp, Glycine max
  unsure (1)..(423): unsure at all n locations
agctttgaattgtgttgtttttcaccttctcgctaagccaatccgctggcttagcgagcgttcgctaagcgcaacactcattggctaagcgcaaggaagaatctggaagaaaatgagctgtacaagttcgcttagcacactgtttcgtctcactaagcgcaccgcttcagtccatcagctaagcgagaaaggcacgcgctaagccgaaattcactaatgtgcgctaagcggtccagaattgcgctaagtgcacgagcacgaacaaggccacctatttaagcttgagatcagattttgtgaagggagtttgggctaggattcagagctttgcatgtctagagattctagagagagaaaggtccaatttcagagagttntaagagatgtttgtgtgtgaagatctgcagagactatagctcgaag

SEQ ID NO: 303791 - DNA, 400 bp, Glycine max
  unsure (1)..(400): unsure at all n locations
ngaaggcaaactggacgttggtcaacttggtaacccagctggtcttgaatcagaaatctgtacctgtcgcaagggtttgtggtttgtgctcctctgctgaccaccatacagacctttgcccttccatgcagcaacctggagcaattgagcagcctgaagcttatgctgcaaatatttacaatagacctcctcaacctcagcagcaaaatcaaccacagtagagcaattatgacctttccagcaacagatacaaccctggatggaggaatcaccctaacctcagatggtccagccctcagcaacaacaacagcagcctgctccttcctttcaaaatgctgctggcccaagcagaccatacanttcctcaccaatccaacaacagcaacaaccccagaaaca

SEQ ID NO: 303792 - DNA, 381 bp, Glycine max
  unsure (1)..(381): unsure at all n locations
cctaagcagccaagtgaggcacaacagaacaattatgacctttgcagcaacaagtacaatcccatgtggaggaatcattccaaccttagatggatgaaaccttcacaacagcttctgcaataacaacaacatccatacttgcataatgttgctgggccaagcagaccatacgtttctgcaccaaatcaacaacagcagcaaccccagaaactacgaacagtcgaggctcctacacaaccttctcttagagaacttgtgaggcaaatgattatgcataacatggcagttcaacaagacaccagagcctncattcagagcttaactaatcagatgggacaattggctacacaattagatcaacaacagtgccagaattctgac

SEQ ID NO: 303793 - DNA, 154 bp, Glycine max
tcactgatagtagtattgatgtagctatcatcaaggaattctatgtcttcctctacgacccataagacaagtcacctaatcaggtgacggttagaggtcatttgatcaaatttgatgaaaatactttgaacacattcctgaagacccttgtaat

SEQ ID NO: 303794 - DNA, 410 bp, Glycine max
  unsure (1)..(410): unsure at all n locations
agctntntattttcagtagatgaagatgaatctgtggccacctcatggactcctctaaggacaatagcatcatttcttgcactgaattgttgggagttagaagccatcttctcgatcaaattcctggcctcagcaggggtcatatcactaagggctccaccactggcagcatcaatcatactcctctccatgttgctaagtccctcatagaaatattgaagaaaaagttgctcanaaatctggtggtgaggacagcttgcacacgatttcttgaatctttcccagtactcatacaagctctctccactaagttgtctgatgcctaaaatgtcttttctgatggcaatggccctagatacaggaaagaatttctccaagaacactctcttaaggtcatcccagctgaaaat

SEQ ID NO: 303795 - DNA, 426 bp, Glycine max
taagatattaaggatctgagcaatttcgaatagattcatcaaggtaaggggggtctatcaaattcttgaaccctaaccttgttgtctttggaaactaagtttcattgaatgttgttttgatgatcaaaattcgtagctaattccttggatggaactgtattatatgttgtgtttcttgaaattctaaggttaaaaatgagttccttgggtgtcaaaacttaagtttagctttaaatttctctaaaatcggagttttctagtaaaagttatgaacaaaacaagtttaaggaattttatttatttttttagactaaaactgtcatgaaaataaagttggtgttatggctgtacggactgttttttctttaaggttgacttcaaaatgagttcttaagtgtgaaatatagtgagcatataaaattatga

SEQ ID NO: 303796 - DNA, 391 bp, Glycine max
  unsure (1)..(391): unsure at all n locations
agcttggtgtgtcataaagggcatagatcattattaattagaatttgcctcttggccaggttgtccttagtaggaagtctatcccataacaacctccagacaaaggatcccatatcagccactatatgatttctttgagaggaaattgagtacaaatctggaaattgatctttgagtggaattccatcctcagcccaggcatcttcccagaacaaaatttgatcacccctacccatcttccagcagaattgtttagagacggcagtcatattgtgatcttgattgagtgcctttaggtcagcccaccaggtggagaaatgttgnttgtgaggcccctgatccaatcctctccagccctgatatttagaaatcaggatcctattccacagct

SEQ ID NO: 303797 - DNA, 371 bp, Glycine max
  unsure (1)..(371): unsure at all n locations
tgcttgtggngcttctatggaggctggatctttgagcttcaatgatgtcctttaatggtgattttccaccatggagatgcagcggaagaaaaaggagaagaggtgagaggaggcgccatccactatggaataagccatggaagaaagagcttcaccaccaagatgagccttggataagaagcttggacaggatgcttcaatggaggaaaagaaagaggtagagaaagagagagggggagcacgaaattgaaggaagataaagggagagaagttgaactttgagttgtgtctcacaagactctcattcatcanagttacaacaagtgttacacatgcttctatntatagactangtagcttccttgagaagc

SEQ ID NO: 303798 - DNA, 375 bp, Glycine max
  unsure (1)..(375): unsure at all n locations
agcttactattattattagactaatacaaaaattacaaaattatgggacaatgttaataattaatgttacactttaagcattacaggagctagtaggtcattagttttacacttgggccatagccagtcattaatgttatagttggaccttattggaccttgggaaaccatggttgttatacttaaacattatttggccttagttaattattggtgttaaactttaacctaattgagcctaacttaattattagtgtaacaatgagctntgttgggcattaaatagtctttaactttataatttagcctagtagggtctttgacaatcattagtgttacactngggtttaattggacattggtcaatcatcatca

SEQ ID NO: 303799 - DNA, 307 bp, Glycine max
  unsure (1)..(307): unsure at all n locations
ttntactntattatttaactataactttcataataattatttgtaaattatacttanggngaattctaaatagctattagtggaaataagaaaacatcgatgacatatgaaaatcatacctcattacacaatttcacagaattgttagtatgttttttttttggattttcaaggttatgatttatttagaatgtttatattaagagatagacatttcttatcaaacattaattttcattatgagagagaaccttgataaaactagtcttctcatctggagggtcacgaatcgacactatgaaagtag

SEQ ID NO: 303800 - DNA, 420 bp, Glycine max
  unsure (1)..(420): unsure at all n locations
agcttctctacagtcttcatcaaatgctaacacaacatccttgtttagtaaattgctaagtggtttggcaatctttgaaatgtcttttatgaatcgcctataaaacccagcatgtcctagaaagcttctcactcctttgacatttactggaggagggagtttctcaatgacatcaatctttgctttgtctacctcaattcccctcacaaaaattgtatgccccaacacaatgccttcttgaaccataaaatgacatttctcccagttaagcaccaagttggactcttcacatctctgcaacaccctttccaaattcgatagatagcaatcaaaagaagagccanagatagagaaatcatccataagaatttcgatacacttctccaccatatcgaanaagatngccatcatgcacctctg

SEQ ID NO: 303801 - DNA, 235 bp, Glycine max
tttcaaagttagtgagaaagctaaacgaaaaattatggaacttaaaaaaactaaatccttaattggggcgtatgtgacaatcataatgaattactaaacaagattgggagtttacttaaggtcattccagatactcctcaaactcagaaaatacttccaaaatggtaacaacaagtaccctccaattaattaatggtattaatgaagatagtgaccaaaactcatataacacaac

SEQ ID NO: 303802 - DNA, 411 bp, Glycine max
  unsure (1)..(411): unsure at all n locations
agctttgtgtgattggtcttcgccggcgaaaggatcgaagtgggtctaanaagaggaaaatctgatcatcctgctttgataaatgcaaaaaaaaaaaaaaaactgaggcaaataaagaggatgagaaggagggagaaacccatgctgtgatagccattcctatacggccaagtttcccaccaacccaacaatgtcattactcaaccaatagcaacccttctccttacccaccacccagttatccacaaaggccatccctaaatcaaccacaaaacccacctaccacacaactcagacgcaaacggtgcttatcgtggaggagttccggagcattccattgagcattgtatggccctgaagcataaggtgcaaagtctaattgatgcgggatggctacaaattgaggagaat

SEQ ID NO: 303803 - DNA, 308 bp, Glycine max
  unsure (1)..(308): unsure at all n locations
gtggctggaggtggattctctnttagtcctcaaggcttttaatgttatcagtgtggctccttaggatttaagaaatgtctggatgaatactgtattctattgtggcccaaatggagtttcgtgtctcccatattttccgagatagtaatgtatgcattgatcattaggctaactatggtgtagaattgctctattatgtgggaagataaactttgaatttggatgaggtgtacaaggggagatacttggtgttgcaaggacagaaaaataaagataacatttgctatttgaatggacaagccttgaag

SEQ ID NO: 303804 - DNA, 181 bp, Glycine max
  unsure (1)..(181): unsure at all n locations
ttaagagagatactcattctgaataccggncattccttgtttagttctcaagtcangtaataccatgtttagcttgtaggagtctctattttaattgggtaccatgtgatcgtgatcgattacttccttcttgaaagagttcgtaggaacgagcaagagccctttattccattgaaatcac

SEQ ID NO: 303805 - DNA, 275 bp, Glycine max
agcttgtctctatatggcatagatcaccattaataaaaagttgcctcctggccaggatgtacttcattggacgtacatgccactaccgcctgcagacacaggatcgcctattaaccactctatgattgctttgagacgaaattgaccactaatccggaaattgacctttgagtggaatatcatgctcagaccacgcatgttgccagaacaaaactcgatcacccctacccatcttccagcagaagtgcctaaagacagcagttatattgtgatcc

SEQ ID NO: 303806 - DNA, 60 bp, Glycine max
tctatctttgttttaacgcatcatttcaaagattcgatgatatttttgcatggtaaattt

SEQ ID NO: 303807 - DNA, 423 bp, Glycine max
  unsure (1)..(423): unsure at all n locations
agcttcggattgtaagtattggattggatagctcgtgcttccaagctacaaataaatttgaacccaaatatgatactcctcgttttttatataaaattcaattacttaatttatcaaattcaaaaaaaaattaattgatatcaataaatttattttacatttataacttttttttaaattttccttatcaataatatttcatctcttctaatagtttattaatatattttgtttcttattttaatgagagatgtttttagtataaaaataattaatacaaaaaatattataaattgagttttataaaaaaaaataaacatcaattcaaatttgagtcttatagataagaacaaagggagcaatgctaaaagaanaatgttaaagtcacaatctntttatgcacactccttattggttcacatc

SEQ ID NO: 303808 - DNA, 441 bp, Glycine max
  unsure (1)..(441): unsure at all n locations
taccttgaagaagaattgtagggcacgacaactttggaaagggaaactccgtggcttgcacagtggcgcgacaagacgagacgccggatgcgcgataatggactacgcccttcgtccgaggtcacgacaaggtcacaacatattgaaatttcagacaaacagggaagtgggagctcgagctagggcgaggttggagtgttcatgaattagcacgcaaaagcttataaacctcaatgttaacgacggtgggtcaagaaaaacgtcattgacattcaaaatttctacgacgttgttttcaaatacaccgtcttaacttacctgttgcgtaacctacatagacgggttacccaatgaacatcgttgaatgtgtcacgcgccgtgcacatggcacataanaagggcacatatttatagaaatgccaccgctaattctactacgac

SEQ ID NO: 303809 - DNA, 410 bp, Glycine max
agcttgccatggtagtcgtggacctgaaggcccgactgaaggagtcagagtccaggatggaggattccgagttatgggcatccaatgagagggaggctaactatgagtttgaataggagttgctagtatacaagaaggaggttgtcgagtagcatgaaaaagggttgcacaatgctgttatgcatgccgggatcttcgtcaaggaccttgtcttggctctttgtaaccctttctagcacgtgaatgatggtgttctacttatcaaggaagatataactgctgatgaggagacgagcatggagtaagatgttggggccaatgtttacgccgatgtttaatttcttgtttgctggattttaggcacaatggctatgtaattatgaaaattcttcgttcgagaatgaatttcc

SEQ ID NO: 303810 - DNA, 421 bp, Glycine max
  unsure (1)..(421): unsure at all n locations
tagtaagttatgtacctgtgttccttgaggatgtgcttagtttaccacctaagtgtgagattgagaatctagtaggtctagtacccatagaaaactgtaaccgtagagatatttggtatatagctgtagagcgtatacaatagttgggaaagttgtaaggagtagttatagtatgaaacctttagaaagtgtaaggtcgatattaaggcgttgttttgctgagcataaagggattcgagagtgagtattcttatgtaaggtagatgacctanaggattagcgatgatagttgtatgattagtgagatagatcttagttctctttacctttaatccgggtaaagtctgaggatgctctgatgactatcatagtaccttccatggactatacgtgtacctggtcatgtcttgacatgatcgat

SEQ ID NO: 303811 - DNA, 407 bp, Glycine max
  unsure (1)..(407): unsure at all n locations
agcttcttgcacgagatcaatatatttattagcatatattaaaggatgaagacgtggtacgtgatatcttttggtgtcaccctgatacagtgaagttagtcaatgcatgtaatttggtattnttgatagacagtacctacaaaacaaatagatacaaactctcactacttgactttgntggtgtgacaccaacagggatgacattctctgctggctttgcttatctagagggtgaacatgttaataatgtggtatgggatttaaaacggttccgaggtatatttttaagatgtgatgccctccctagagttattatgactaacanagacctagtattgatgaatgcagtgaanactgtattccctaagtgtacaaatttgttgtgcagctttcacataaacaagaat

SEQ ID NO: 303812 - DNA, 393 bp, Glycine max
  unsure (1)..(393): unsure at all n locations
ntgaagttagtgtattttattattagtattattatacatataattaaatacttttatgggtatgattttctattgataattcatgtctatgattttgtagtgttattatgacatgatctcgaaagttattgatatgttgaaattagaaaatatttttatttaatttgatacatgtgtatatgattcatgagatatgataaattattatattgngatcatgaaattgtgattgagaatgtgtgtgtaagtgatgaattgtgagatatatgtgtattgagatgtgagctatgaactctacaatcacacaattgtaagagcctttaagagcgatgagttaatgcgcgataagnnttgtatgagctctactgtgggaacccgatgaagttaatcaat

SEQ ID NO: 303813 - DNA, 424 bp, Glycine max
agcttctggaggaagcctcttaatgaagcttttagagaaaatacatgcagctccctcggtaaacacgctgcccagcctttgttaaccattggatcttctcgaaatttggtttgcgacttcacaagacacttgtccatgatctgaccgttgctatctttgagaagatgtctggagtgtgctagaagcttccgttcccgagagcatctcttatttaagcatttcagcctttgctttcgtgtagcttaagaaaaacgtcatttcttcttctttctttcttccaaatccatttctaaagttccaagaactttctccatcacccacagccaccattagccaccacataccatcgttggtctccacaccgagaggaacccttcaaccgaagcagaatcttccaacttggcttggcggttcggtagagaac

SEQ ID NO: 303814 - DNA, 428 bp, Glycine max
  unsure (1)..(428): unsure at all n locations
agcttgcttctacaatctccccctttttgatgatgacaaccctgaaatcaagaaacacggcacacactttttcctagtcgatctctcacttaattctccatattctccccctttgtttttgagtttatgcttcatttgaaattaagttaatcacttatgtgagttcttgatttaatccctatttctgtccccctttggcatcaacaaaaaagccaaagtgcgtaataagtaaaaaatgtacatacactactaatcatacacaagacattcattaaaaagtataaaccaatcatgaagcaagaaacatgaatagatcaaatatataaaaaaaatatagtcatataacataattcataattgttcaatcataccatgcaaataanagaaatactanattgttcanatgtcataataatatagattattta

SEQ ID NO: 303815 - DNA, 472 bp, Glycine max
  unsure (1)..(472): unsure at all n locations
ntgtacctcattacggacctatgaatactaagcttgactgaaacgcantggcttagtgtgtggggaaccgattatggaaatggaaacaccactagaggttcggttggcacaagcgttgggcatgggccaccaggacatggataggtggactatacatgatggaaggaattttatggataagtgcacactttataactatttttagaccatcattaatgaccatattaactaatggatggataattgtattaaccttggaaaaaatgtgacaattgatgaacctggtgtctttatcattaatgaatgtatgaacctaatggctttgacagcttatgcgtatgtagattttaaggganggtatttcaaaattttcatagaaataagaactaccatgatcaaataagtgggcaataaggttacataatctacgacatatagaagtcaaaaacatggtgcacagaagtgccaaaag

SEQ ID NO: 303816 - DNA, 209 bp, Glycine max
agctttgagacaattcaaacgaccataaccttttactcggatctctaattgaggcccgtaacatatcgagatgctcgaaattgaatgtggaatctctgagcccattcaaacgaccataagtttgtactccgatgtctgattgagtccccggacatatcgagacgctcgaaagtgaatgttgaagctctgagccaattcaaacgacaata

SEQ ID NO: 303817 - DNA, 232 bp, Glycine max
tcaacattcaatgtcaagcgtctcgatatattatgggactcaatcagacatccgagtaaaaagttattgtcgtttgaattggctcggagcttcaacattcaatttcgagggtctcgatatattacgggactcaatccgacatccgagaaaaaaattattgtcgtttgaattggctcagaggctcaacattcaattttgagcgtctcgatatgttacgggactcaatcagaca

SEQ ID NO: 303818 - DNA, 53 bp, Glycine max
tcatacagcacatgcatctacactattcagtcagaatcaaagaatgaatacat

SEQ ID NO: 303819 - DNA, 354 bp, Glycine max
  unsure (1)..(354): unsure at all n locations
agctntagcatatcgtatcatatggtttccttcttcaattgccttgagttgcttcatttctggattaaatccggcgatctgccgtgaggtccaagttctgcaaccagtttcgttgagtcaggaagtagcatatgctaggttgcacgaagaaaagcagaacgatgcatgaaggacatttcgaccttcgtcagttgtaggagcttcctcaagctctcgaccatcgctattacccactccatccaccaaccccccactgttaccaacaccggcacaaacagcttcttccagcattccattcaagagactaactccagaagaattggccttatggcaagaaaagggactatggtttca

SEQ ID NO: 303820 - DNA, 329 bp, Glycine max
gtcactatctaatactcaagctgagatactgtcaacttgaagctagcttagcttagccttgtcctgcttatcggagcagatctgccttagatgcaagggatgggtgctaagcgcttgagactcgcaacttagcgcatgaatagagatgagcttagcgcgaggcttgtgcttagcgaaaggactatttttcagataaaaaatctctaagttattcttcagccctttttccttgaaattgaaacccttatgttaagcattcaaagattggctgatatactcctatgtacatattatataacaagttccacatgatttacatgcataaaaag

SEQ ID NO: 303821 - DNA, 394 bp, Glycine max
agcttgtaacatgagctgaagcataagaaagattcttcttataagttagatgctgcggcgaagcttgattgcttgattgaaacccatgactgaaactcatttgactgtcagactggaaagggctccctcctgatggagtagatgcttccaaatacaaaacttgattgaattggagcaggttgcatacctgtgtggaggtacaggctgctgctgccggagtgaatgaaatgcgtagttgatgcactggaggttaattaaaacattgaatgagaactggcagaagcaacagacgcagtggatgacgatgatgtactaaatgtggaaccaaatgcacacttggcgggctgcctactaaagtagaacttggaccacattggagctaacacattatacc

SEQ ID NO: 303822 - DNA, 441 bp, Glycine max
  unsure (1)..(441): unsure at all n locations
cacgaggcctttctttgggtttgtgaacatccctgtttgccttcttcttcacggcagttgggttattcctcagatgcctattggactcaataaaatcttccaattggatgtacctttaggccttaaccccgattttgggccaaggcagagggcggcttttcgcaaaggctattaatgaaaaagtttggttgtaatgttgtaaccaaatggtgcctaactaccaccgagtcaagatttagaatatccaaggctgccttcccaaacctttccatgaaagaccgcactgtttccttcttttcttgttgctaacttactaaggagaccaacaccatgtgatgttgactagttgcaaactgaagcccaaacctcatgggctcaaaacagtntatggatcctcgtggagtccagtgaaccaactcacagctgtttctttgagtgatn

SEQ ID NO: 303823 - DNA, 427 bp, Glycine max
  unsure (1)..(427): unsure at all n locations
agcttgcttctacagataacacatacacggttactctaaccaaattgacttttgaggttgatttgtgtttgtgtttcatgctgtcaatttccaggttgtccttgtaatataatagtttgtgaattggagtttgtgtttatagcaagagaatggatgagtcaacaaacaggcataatgataatttgggtgtgaacaaaatggggaaaaacattaggaagaccaaaagagaccagcccaattatggcatgaacaacaacagcaacatgaatgggggtagacagcaacagcaacacaaacagcctcagctttacaacatatccaaaaatgatttcaaggatattggtcagcagaaaaaaaaagttgattacgatcactcctaattntaacaaacataaattatttatatttcaatattaacacatgtatg

SEQ ID NO: 303824 - DNA, 440 bp, Glycine max
tgccccaaccttgggaatgagctatagaaataaccaatataactccctctagttcagctgaaaagaaagaaagatacccacatataaaatatatcctcctaagaaagcaccagagtcatcatgagataacctaccatatataagggaaccctgaaatgattttactagccttacgtgcatgaatattgatgttaaaagctttgatgacctgaaactcactcaaagaggatctcatacagcttaaagtaagataaccagccccaagcaaaatatgagcaaacataatgatcattgcttgctgctatgagacaaaaagattatgaaagtaggcttgattgtggcaatattagattgcccaaaccacaaagataaaaccagcaagaacaacatctttagcatgcgggcgaacaactgccaacatccaggataagatcaatagg

SEQ ID NO: 303825 - DNA, 263 bp, Glycine max
agcttcatgctgctcaattgctccacgttgctgcatggaaaggcaaaggtctgtatggtggtcagcagaggagcacaaaccacaaacccttgcgacagggacagatttctgattcaaggccagctgggttaccaagttaaccaatgcatccagatttccttcaagcttcttaaattcagatgatgcagatggggttgtagctacctcatgcactactctaatgactatggcatcagttatggcgctaaactgctgggagttgg

SEQ ID NO: 303826 - DNA, 320 bp, Glycine max
agcttgcctgttgtgttttgagtactgtaatagggtgtttttacagttcctttgaaaaaaccttgaaaatgagatgttgtaaaagttatctttttataaaattgatgttattttcctgaccttcgttgaaccccgatcacattggcgcgatcggaattttaaaatgacatctccttgtagtagaatctgaaacactcctcagtcctttatgttttgacaggggtaattgatcctaaatgttgttattaaccttattttttaaatatatactaaatttccttcaatttggtatataaaaccttgcgtttggattgacaaac

SEQ ID NO: 303827 - DNA, 246 bp, Glycine max
  unsure (1)..(246): unsure at all n locations
tataagaacaaaatttcctcaatcatatccaaatacgcatgctaattangaagcatcaacaagaatcaagccaaggctattgtgcangcaatcaatgggggcaaaacacaccaaatgattatgatgatggatggctcaaattctcacacaggtaaactcatcacttttaaattgagctttcaaaactatcatgacatgtagaggagaatcaaggatttcaagtcacaacatgtcaaaaacttttat

SEQ ID NO: 303828 - DNA, 382 bp, Glycine max
  unsure (1)..(382): unsure at all n locations
agcttccagtagtttgagaataagcaaaaacctcaatccccaacatatataaccttctctttctgctgggttgtgcctcttcctgctatgcgtcttcttgctgcataacacctcttcctcttcctcttcgatcatcaccacttcacaatgtcgtcgaagttcgacccctcccattgacgtcttcatccgcataaccgatggcgaggttagtgcgacgagttccctcccagagcgtgagaatgaagagaagggttgagagtcttgatccgtcgagcgtgaagatgagcataagaagagaaatgagtgaggttttagggttgattcanaataacatcattctcgagcgtgacaatnttttttaacgtacacaacccatttcagc

SEQ ID NO: 303829 - DNA, 388 bp, Glycine max
  unsure (1)..(388): unsure at all n locations
nntaaatttgaattaaaacattcagaaactgctggtaatcgattaccatatatgtgtaatcgattacatagtgcaaattttgaattcagattttaatagctgttattaatcagttttggccactggtaatcgattacatcctctggtaatcgattaccagagagtaaatttcttgaaaaagactttttaacttaaatttcttggccaaaccttttgctacttcaattggaattcccttcctattaaatataccctttctaagactctagagactatcctgatcatccatcttgaatatctttaattcctttgtcttgaataaagctttgagacgcatgtgaacctttggcatcatcaaaacattcagcttgatcctttgtctacatat

SEQ ID NO: 303830 - DNA, 418 bp, Glycine max
  unsure (1)..(418): unsure at all n locations
tgcttcaggatttgaaagtgagacatttcctcaacatgttttcaaactcaaaaaagccctatatggacttaagcaagctcctagagcttggtatgaaaagctaagttcatttctcttgaaaatggctttgagcgaggaaaggttgacacaacactcattcacaaaaactatgattctcagtttttattagtgcaagtatatgtggatgatatctcatttttagtgctactaatgaaattctttgtgaagatttttctaagtagatgcagactgaattcgaaatgagcatgatgggagagctgaaattctttcttggattacaaataaaacaaacacccanaggcatctacattcatcagaccaagtatgtgaaagaattactgaanaattcaacatgggtgtcgcaatatagataaag

SEQ ID NO: 303831 - DNA, 431 bp, Glycine max
  unsure (1)..(431): unsure at all n locations
tatcctgtaactaccaagaaccatctggtaatcgattacagcctgttgtaatcgattacaaggtcctgttctatggtattttgcatttaaaactaactatttttcactcacaaaacctacacattgagtataacaatcattaacaacaatcaacaatcaaaatatacaattaaaacaagcatcaaaactctcaaacacattcatcaagcacaatcaaaattgcaaaagacaattatcaacaacaatcaacactcatcataactatcaaaacataatcattagagacaatcaaaactcaaacaaagacaatcattaatccataatcaacaataatcatcaaaagcaaactcaattatcaagaacaatagaacanattaacaatcatatgataagagataataatcaaccaagttaactatgtatctaagtca

SEQ ID NO: 303832 - DNA, 340 bp, Glycine max
  unsure (1)..(340): unsure at all n locations
agcttgatcaaaacaattatctaatcattccaatccactcaaatcatatagttgctcattcaaatcattctcaaacactcatttcatacaaaacaatccactgcatatcaatttcaaccaattcactgttcaaacacgctttttgtacaagcaaacaactcagagtactgaaatttaaataacttgaaatttaaagaattgaaacatacaaattgaaatttaaatgactgaacataaatcataaaataacttanataaactaaaatgttcaaaatgcacaaatttaaatgtccttctcctgtggttgcttctttgcatgctcattaagatacaacatctg

SEQ ID NO: 303833 - DNA, 322 bp, Glycine max
ctgcggttgatttacggatagcctctgtggataactgggcggtgggtaaggaggaggattgttattggctgagtaatgacattgctgggttggcgggaaactcggccgtataggaatggcagtcacagcatgggtttctccctctttatcaccctcttcatttgccccagctttctcagtcgtcctaacacgatgatgaaatttgcctctgttcggacctacatcgatgctttcactggcgaagaccaaattcgccaagcttttgagggtgcatagcccaccatcttttcatagtagagtaccgataatgtgtctaccatca

SEQ ID NO: 303834 - DNA, 338 bp, Glycine max
  unsure (1)..(338): unsure at all n locations
agcttganattgaacaacggaagctctcgagaaaatcgagtggtcataaattttcacacagatgtccgattcggggaaataatatatcgagacgcacgaaattgaacaacggaagctctcgagaaatttgaatggtcataacatttcactcggatgttcgattcggggacataatctatcgagacgctcgaaattgaacaaccgaagctctcgacaaattagaatggtcgtaacttttcacgcgaatgttcgattcggggacataactcatctagacgctcgaaatngaacaacnggagctctcgagaaatttgaatggtcataagttttcacacgga

SEQ ID NO: 303835 - DNA, 392 bp, Glycine max
  unsure (1)..(392): unsure at all n locations
taacaatggggagatggaccattcaagtgctggaaagaatcattgacaatgcttacaaagttgagctgcccggtgagtataatgttagttccaccttcatgtcttgattacctcttttgatgcagatgtagaatccgatntgaggacaaatccttctcaagagggagagaatgatgaggacatgaccaagagcaagggcaaggatccacttgaaggacttggaggacctatgacaagggctagagcaaggaaagccaatgaagctcttcaacaagtgctgtccatactatttgaatacaagcccaagattcaaggagaaaagtccaagggtgtgagttgtatcatggcccaaatggatgaggactaaatgacaccactttgtctcnaatttt

SEQ ID NO: 303836 - DNA, 428 bp, Glycine max
  unsure (1)..(428): unsure at all n locations
agcttgaatgataacttgatgccttggtcaacctaccaactcagcttgccatgaatcagaaatctacacctgttgcaagagtctgtggtatatgttcttctgcagatcaccatacagatctatgtccttctttgcagcaatctggagtcaatgagcaacctanagcttatgctgcaaacatttataatagacctcctcagcagcaaaaccaacaacagtagaataattatgacctttcaagcaatagatacaatccaggttggaggaatcatccaaatctgagatggacaagtcctccacaacaacaatagcctgtccctcattttcagaatgttgctggtccaagcaagccatatgttcctcctccaatacagcagcagtcacaacanagacaacaagcaatttcaaccttccttagaagagttagt

SEQ ID NO: 303837 - DNA, 431 bp, Glycine max
  unsure (1)..(431): unsure at all n locations
taacctaagtaagtaagtaagtgaccaatgtaccatggagaaatccctgatcttcatgaagtgccactccttgattcanattaactgcgagccgggaagagttgtccacgtcgttgggttgaatggaagaacaaggaagatgggctagggttcaatttgtaacgaagagggtctagggttcaagttgtacgagctcgaggtttcaaatgactaagctagggttcaaattgtaacgataaagggcttcaatgcaaggtgggagctgaggctctgctattcgaacacgtgtttgtatttttccccaattacgacggtctttaacttanacctgccacanactntattgcatgtaacattctaanggcggttttaataaccgtcttggaatgtgcatcgtanaatgtaattntttttacaattattacaaaaat

SEQ ID NO: 303838 - DNA, 422 bp, Glycine max
  unsure (1)..(422): unsure at all n locations
agcttggcactatcaacactataaggcanattcccaaaataaagcttggtggcagaggaatcagagtcttgttctgccaccgcttctccttcattctcctccactttctcttcttcaactaaaccagcaccatcatcatccacaacaacaacagcctcttcttgtgcaacagcagcagaaattctaggtccccacaacttgtgcgaattaatggacaaaggttccaccaagtgtgacccaaacatgccacggtttgagggcactgttgttatgagagggtctattatggagcagttcttggaggaacgaagacatttgacactgttaatagaagaagaaaacaaggaagctatgcctgcagcagcagtggcagccatgttgttgttgtgatgtaatgcaactcanaagtgtacattacaagt

SEQ ID NO: 303839 - DNA, 192 bp, Glycine max
  unsure (1)..(192): unsure at all n locations
cttgcgcgatttattcttttgttctttcttgtgaaatttcttttgtaaatctttgtatagatactaagctctcaaaatacctcgtaaatcttcagagaanaagactaaagtattgagtgatatatatttatatgtaagacgatcatgtattagtcatggtgtanactttcaatgaatcttggtatttttttt

SEQ ID NO: 303840 - DNA, 389 bp, Glycine max
agcttggagttgttcttaatggatgaagagaatgagggagataacgagagaggtgggagcacaactatgatggaagcacaatggagataagctgaactctaagttgtgtctcacaagactctcattcatccaagttacaataagtgttacacatgcttctatttatagactaagtagcttccttgagaagacttcttgagaaaacttccttgagaagcttctttgagataactttcttgagaagctagagcttatctacacacacccatctaataactaagctcacctccttgataagctagagattaactacacacacccctctaataactatgctcacctccttgagaagagaagctagagcttagctacccacccctataatagct

SEQ ID NO: 303841 - DNA, 255 bp, Glycine max
  unsure (1)..(255): unsure at all n locations
gacactatacaagctcatgtgactgtgtgcaaccacaaatcttacattgagtatcctctttgatatgttctacaatagaatttgcatgaatttctaattgtcataacatattattcatggatacgatctaggcattccttctttctttacattttaagccattgaccagacaactatcccaacgtatattattttataatttgtaagccctttgagccaaacacttgatatttttggaacactaacctangataa

SEQ ID NO: 303842 - DNA, 74 bp, Glycine max
ttgtagaggttaacgaaacaacgagatgatgcgctccatgacatgctgtgtcagatggataatcgagaccatat

SEQ ID NO: 303843 - DNA, 377 bp, Glycine max
cgtgatgacgacataagttcaagtcaggaatatatatatatattatatatatatagcatgtcgagagacaaatgtggggaaaagttatgctgtgtcttgaagaatccatgccatatggatgctacagagtgaaagggacttgttttagtgtagagagatgaagaaagctctacgttaatttggaatatgatttggtgtttggaaggagaaccgtaaaagagggtgcaagagtttttcaacgtgttccagaggcttcatgtgttactttgtcaacatattggtcatattcatcggactacagcttttctctttaagtaatgttttgggcaatttcacactaagttgggattaagtccaatatcaataccatacctact

SEQ ID NO: 303844 - DNA, 397 bp, Glycine max
agcttatataaacaaaattgccttaatcattcccaaatatgcatgtgaattaagacgcatcaacaataatcaagccaaggctattgtgcgagcaatcgatggggcagaacacaccaaatgattataatgatggatggctcatattctcacagaggtataatcatcactctcaaattgagctttcaaaactatcatgacatgtagagaagaatcaaggatttcaagtcacacaatgtcaagaacttttattttcaaaacaattacccatttcttgaacatatactataattcacagaacaacatgcaaagtcgtacgtgcacactaaaatgacccatagtattagactgaatatgcgacgaatctaacaacattaacagattaacacaactaacaaat

SEQ ID NO: 303845 - DNA, 380 bp, Glycine max
  unsure (1)..(380): unsure at all n locations
tcgaanagtgtcgcattgcaccttcttgctaagccaatctactgtcttatcgagcgtncgttaagcgcaacactcatgcgctaagcgtgaggaagactctggaagaagatgagctgtacagggtcgctaagctcagcgcttcatctcactaagtgcaccgcttcagtccatccactaagcgagatagacacgcgcaaagacaaaattcactaatgtgccctgagcggttcataattgcgctcagctcatgagcacgaacaaggccacttatttaagcctgaaatcagattttataaagagagttcggactgggattcagagcgttgcatgtctagagattctagagagagacaagtccaagttctagagaggtctgagag

SEQ ID NO: 303846 - DNA, 414 bp, Glycine max
  unsure (1)..(414): unsure at all n locations
agcttacatagccctaatcttanactgattctaacaacataaaaaccctaaaaatctaaagctacaattaaagtattctacccttgagttaagacaagaaaaggagaanaaggatcaaggaacttacttggatggtgtatgattgatgcttcaaagtcaaaaatgcacaaagagcgtacagatgcaaaatgtgcaaatttttggagagagagaatgcagaggcgaggtatctgtaatctggaaaatgtgagtgtaactgctgttccactcacttaagcagattttcgataccttcgcttagcgaaccgttgcgctaagcgagcaagatagacgtttggtttctcaaccaagctcgcttagcgagcatgtgcgcttagtcgacgtttcaaattcgaaaacaattttttattttta

SEQ ID NO: 303847 - DNA, 428 bp, Glycine max
tcaggctattcaattgctccagattgctgcatagaagggaaatggtttgtatggtggtcaccagaggagcataaaccacagagtcttgcgacaggtacaaatttttgattcatggctagttaggataccaggttaaccaaggcgtctagtttaacttcaagcttcttagtttcagatgatgcagatgagtttgtggctacctcatgcactcctctaatgactatagcctcatttatggcgctaaactgttgggagtcggaagccatcttctcaattaaattcctggcttcagcaagggtcatgtctccaagggctccaccactggcagcatctatcatacttctctccatgttactgagtccttgataaaaatattggagaagaagctgctcagaaatctggtggtgagggcaactggcacatagttt

SEQ ID NO: 303848 - DNA, 423 bp, Glycine max
agctttctctctttataatatgttgtcactggcattccataccgccacaatattattatcatgagtgatcatacctctagaaaacggccatgtgagttatgaatcattgggagtagttattagagacccctagatactatcctataggtccctaaaataggggcacggagcgaacacgctgcgtgccgttttaaacactgccatgcatgtagtcctaaatgtcatatacgcctttgcttgtaattatttatggatattgtcgtactctgtgcatccccctgttgcgcttttgcgcatctgcatcatgccatcaaacatgcattgtgtgtgggtctcgtctttttcgcgggaaagtgaaagatccatatcgtcttcttaactgcacacatggtgcactgcacccccaaatgcgccagtaggaga

SEQ ID NO: 303849 - DNA, 226 bp, Glycine max
  unsure (1)..(226): unsure at all n locations
tgtagaattcaccccaattccagtgtcctatgctgacttgctcccatatctacttgataattcaatggtagccataaccctagccaaggttcatcaacctccatttctccgagaatacgactcgaacgcaacgtgtgcttgtcacggagaagccccggngcgttccattgagcatggtagggctctgaagcgtaaggtgcaaggtctaattgatgccggctggctg

SEQ ID NO: 303850 - DNA, 256 bp, Glycine max
  unsure (1)..(256): unsure at all n locations
aacaaaaaaaaaaaaagctgacctgactgcaacgnnacnangggcgcgacaaaagacgagaacttattgtttaagaaatcaaggcggaaacgacgagcccaacacacaaggcaaaatcggtaagagagaaagcacacgaagggatgctacaatgaggtaacaacaagaacacaaccgtatgacccctggtcacatactgcaaagggaaaaaccggacacgcccgggcgctctggacaacaagctcaaaaccacaaa

SEQ ID NO: 303851 - DNA, 403 bp, Glycine max
  unsure (1)..(403): unsure at all n locations
agcttttcgattcattctatgtgcccgtagtggtccacattgtgtttcgtgcatttttattctcattntgtttactttttataccccctgttgacatgcttaagccattttacttaagtcatttctcgcttaacttaaaaatagaataaatttccaccgaacgtttgaattgtattatccattaacttcggtcaaaataaattccgaccgttcggttgtgccgtaaccacgttggaaatcaaaaagaggtaaaaaataatataaataatcaaaaaatatctttttagtaaaataaagcggaaaatcaatcggacgttntctctttgggattcctcattcttaatcgaattgattaataactaaagtgaaactaaggctaaaatcaactcgcctagtcaagctc

SEQ ID NO: 303852 - DNA, 385 bp, Glycine max
  unsure (1)..(385): unsure at all n locations
gtggaaatgatttctatacaaaagttagtcgtataaagcgactaacactaccattcctacatgggcaaattntccaccagctccataatatcaatactcagccaatatcagcccttctcattacccaccaccctatcaaccaagaacacccaatcatccacaaaggccacccctaaatccctatataccaaacaccacgcgaaacactaaccaatgaaggaagtttctaactaagaagcctgtagaattcaccccaagttcggtgtcatatgctaacttactcccatatctactcaataaatggtaggcatacccgcagccaaggatactcaaccttcatcttctgaggatgcaactcagacacaacatgcgcttatcatggagg

SEQ ID NO: 303853 - DNA, 335 bp, Glycine max
  unsure (1)..(335): unsure at all n locations
atcttggtgagtgggtcttgggcctgctgatcatgtgtgggctggctctgtattttgagcaatcaatgtaaaggtgcttagtttgctcatgaaacacgagattggccgctatgtggagaatgctttgattatcacaatatataacaactggatgggagcaattgatattaaatcattgagaagataggtgagccattgaaactcacacgtggttgaagtaagagctcagtatttagcttctaatgataaatgtgaaacaatatcctatttcattgatttctatganaccaaggatctgccaatgatgaagcaatttctgtgatggagttggacag

SEQ ID NO: 303854 - DNA, 365 bp, Glycine max
  unsure (1)..(365): unsure at all n locations
ntggacgcgtttaaaggttttaatgctaaagtagagaaacaatgtggaaaataaattaagattgtgagattagatagagaggagagtattatggtaagtacacagagagtggacaagcacctggtccatttgcaaaatttctttaagaacatgggattgttgcccagtacactatgtctagttctccaaattagaataatgtggcagaaagaagaaattgaactttaatggacatggtaagaagtatgaggagtaacacaaaacttcctcagttcttgtggattgaaacacttaagatgattgtgtatatatttaatagagttccaaccaagggtgtctcaaagacaccttttgagttattcaaa

SEQ ID NO: 303855 - DNA, 426 bp, Glycine max
  unsure (1)..(426): unsure at all n locations
agcttgtaatgtttgttgccagcagcattgaaggattcaatgaattcaacattgttttcgaatatcaggaaacgtttttcatctcagcagaatccttgtatactttaccatatttttccatccactgctcatgtctttcgtagatggatgcatcatggagtttgcgggactttacttgggaagtgcaaattgagagaaggagaagtagagctaaaactttcaggtttttgccaatggaaatcatctctttgttagcaattaatgacactacgtactgattaattgttgctagagaaactctattgagtttagtgtttggagctagatgtgtaaattggtatgctcctaaggcaatgtttcgattagtatatataggattattgtccctttaaggggannatatttaatcttagtcagaatgaaact

SEQ ID NO: 303856 - DNA, 440 bp, Glycine max
  unsure (1)..(440): unsure at all n locations
tacctggtcatggattggcatgagttgtaaggaaagatccatagccaattgtcaatattcttaatgtgataataatgtacagtatccatttgggtatagttatcttaaagtagaagttctaaccatgattaaaagaacatcaccgaagataattagcattacagtgtgcagaataggataaataatagttacttttgctccggaatatataatttgttggtccctaaaaaatgaaaatataaaaagtagtctctaaaagtgtaaaaagtgcgacaaatatatattcggttattaactcgtcgaccaccgttaataaaatagcctacgcgatatagagaaacgaattagtcactaaaataactgccaacatgatcatctttaattgtcagcataaggacatatntgtcatataatatttctttgacttttcatcttctcac

SEQ ID NO: 303857 - DNA, 431 bp, Glycine max
  unsure (1)..(431): unsure at all n locations
agctntgatgtgtgttgagaagaaatcacatgtttgtcatcatcaaaaagggggagaatgtgaatgtatgtatacatgattttgatgatgtcaaaagaagaatcatacaaggctcattttgcttcaagattaatacaagattttttcaacaaacaaagccttgattcaatatttcttcaagatcaagccttgcctcaaaatgtagagatttcaagtcatccaaggcacatgtaatcgattaccaatacatgtaatcgattaccaaggcacatgaaagtgtgtaatcgattacacatcatatgtaatcgattaccagagactctgaacgttgggaattcaaattataactgtgtaatcgattacacaaacattgtaatcgattaccagtggaaagttttagagaatctgccaacagtcacatcttttcatta

SEQ ID NO: 303858 - DNA, 334 bp, Glycine max
  unsure (1)..(334): unsure at all n locations
cttgattgagctaagatcacatgttgttattagttaaagaatgatgatatgaggaagtgcttagacaaagtaaatcacagcttcaaatctctcgattgtgaagatctttagtcatacgtgagttgtgttactttcttgagtacaagaagccaccttactcatgcaaacaaggttttgcggaaaggattgatcaagctgagtctatctatactcttggctgtgtgtgtatggntctacacatcttttatttgtgcatgaatcattgaaagcaagctagaataagtgtttctagtctggactatgggtaggtttctcttaggctcttattcacaga

SEQ ID NO: 303859 - DNA, 386 bp, Glycine max
  unsure (1)..(386): unsure at all n locations
agcttcaaagtaaggaaacatgcttatggctaggaatccaaaatttggttntaggattagaaaagcatgaaaatagggacttttttgtaaggatttgagctgccccgtgattggcactttgcacctaagtaacgtgggagatgctttttcaatggtgtgtagatatatgtgaatatatggcataagaatatgttgcaaagtgtgtgaatatatggcatgaaaataccttgcaaagtgaatgaatagtaaataatgcatttcaaaaatgtatatttgtggataggtagcgtaaaaataccttttaaaaaatgtatatttgtggataggtagcgtaaaaataccttttaaaatatgtatatttgtggataagtagtataagaagtctt

SEQ ID NO: 303860 - DNA, 312 bp, Glycine max
  unsure (1)..(312): unsure at all n locations
tctatagaaggtttgttcctaatttctctacaattgcatcacctctcaatgagctggtgaagaagaatgtggcatttaactggggtgaaaaacaagagcaagcatttgatttgctcaaacaaaagcttactaaggcacctgttctagctcttcctgacttttctaanacttttgagctagaatgtgatgcctctggagtggtagttgtagctgtattgttacaaggtgggcaccctattgcttattatagtgaaaaacttcatattgccacccttcactaccccacctatgataaagagctctatgccttaa

SEQ ID NO: 303861 - DNA, 368 bp, Glycine max
agcttcggttgtggttacattgacgtccctcagcttgttgcactctttcccgaccttgatggacgacgtgttgaactgttacttgaccgcttgcgccctttcaagattcacctttaaagcttgcacctcttctctctgctcatgggtttcaacctcttcctcacttgagatctttagcttctggagccaagttatctattgtgatctagccttcagccacttgtgataaccactgatgaccccattgctgcatccgctaagctgcttatcctttctttgcaccgcacttcatgcttttcggacactttgaaacgtccttgcattagggttactacaacctcgtgcgatgaaaggtgtgacactttctt

SEQ ID NO: 303862 - DNA, 79 bp, Glycine max
ggtgcacctcttataccatatttcttctggctcactgacatagaggtgcgaatcgatctaccttctcctacctgctata

SEQ ID NO: 303863 - DNA, 423 bp, Glycine max
agcttgccttgactctctacatgaagcatggcttgaaagtcaaccttcaaaggcgcgatgcttcagaaattgagaagtacttcaaagtttagagaaatattattgaatattgctaattaatattgttatgatttatatggggtgtcagaattatttctatacgtttttcaattacaagtaaggcttgatgtaagtaaacatatatactaggggatgcataatgttaatgaagtttattcagtgtgttatttttaaaaataaaattgaagatgtagtttcctaaactataaatatatagatgtaactctcgtaatagttataataatattcatatcttggaattacataaggtgttaagcataaaaaaattaataattaatatgaaataaatcttttcacatatatagataagtcatatacact

SEQ ID NO: 303864 - DNA, 272 bp, Glycine max
  unsure (1)..(272): unsure at all n locations
tccctcctgtngtgcaagtccacgtagttcaatggacccttccatgatctaatcctagaccatggtagcttggttgactaaggtcaatgtgggtcatgccaccaccaacggtcaaaggatctctgtcaccgccatctctgttggtcacgccaccatcaccttcttcctttgctgctggtctccgctcaacggcagccaccactcatcaatcttcctctgtcatcatccaccatggtttttcgccattcaaactgcgaacaaatagatgcagc

SEQ ID NO: 303865 - DNA, 420 bp, Glycine max
  unsure (1)..(420): unsure at all n locations
agcttctaatgaagtgtggagacccaaaatcattcatacttagacgaaattgtcataaagtgatagaagtcactgagacacgccgataaaggacaatgacaaaataggcgtctagaaagtgcttcactagaaaacgaacggcgagctaaaggcgatggccaaaaaacacgttgaanagagacaacgatagaataggcaatcaaaatgatttgttggaaaatgaacaacaaacaaaaggaggtggcaaccatcgtagagagagacgaacaaaaaatcatgaaccaataaagtgcatatnaacgtgttttcgtagtgggtccaactaaatgatcatgtatgtatggngacaaaactccaggtgtaggagcaaccattatgggcgaccaccatgctagaatgacagccagacaccagaaaact

SEQ ID NO: 303866 - DNA, 422 bp, Glycine max
tgtaaaaacttaagtctgaaatttctctatagataatgaacatttatggtcagaccagaccaacatcttttcacaatacagtgtttctgatatttttgactcagaaatttccattcatctcattggaaaagtccaacccacatttcactgtatattagattcaacttcttgatatcatgtgctaacgaagcacaagatttagactcatgatattgagttcgggatactcagaaatttaatctacaatgggcattttgttgaataaaaagcaggcaaaaattaaaatgaacaaaatcatgccaataataactatagaacattagacaacactgacaaacttagtcgcattagccactaattgaataacagagcttagttgcaaaatagtagtaagccaataaacatacacagaactagacaat

SEQ ID NO: 303867 - DNA, 373 bp, Glycine max
  unsure (1)..(373): unsure at all n locations
agcttggagagcaagtcttccttagtattgttttcccttggtatgtggtacattttgagcaattgaaattatcaacaagggtttttatgacatgatagtttatgaggagaaccacttccttggctcgatatatgttttcaacccatccttggacaagtttcgagtccttatagcacctgagtttccttgctcgaacttcatttgccagttttagacctgctatgagtgctttatattttgtttcattgtttgatgccttgaagtcaaatttgagggcatgctccanagtgacattgttgggtccttcaagcataatgcccgcctcatttcctttcacattggatgcaccatcaacatacaagttccaccagtt

SEQ ID NO: 303868 - DNA, 426 bp, Glycine max
  unsure (1)..(426): unsure at all n locations
tcacaaaagaaaagtggataatccacatattacaaaaggttgacttccacattaccatcccccacaaggaaacttgcaaacaagttnttctcaatagtttccctctcaccatctcacacaatccttctaataacaatagtaaacaagaaaagtgtcaatggatcaccttgtcttaaaattttttgagcgaaaaattcataagtatttcagcaacatcaaatggtacttgatgtcaaacatcccttaatccaatgaatccacttctcatcaaaacccaacctcttcatatagaacaagaaattccaattaatcanataataggttnttcataatctaaactaaagataagactntntctttttccttnttctttatcaatggtatcattcaccgccaacacactatgaagtangaattttctcccaa

SEQ ID NO: 303869 - DNA, 421 bp, Glycine max
  unsure (1)..(421): unsure at all n locations
agcttgtccctgtgcctcctcctgagatattgnggtggtctttccaatgataacatcctcaccagatactcgtgtgccctatttcataataattaattagttcttgtgaaattccttgaggatagatcaaaaaggcataaattcagatatgcttactggtggggcaagaccatcatcatccagcttatcataagaaccatgtctcattccctgaaaaatgaaacttggtaagaaaccaccaacaagaaaccaatactcttttccaaataaaaattgttaagcaagaatagttatttgctaccaaacccaaatttctcaccatggtgttagctctatcaggacggccacaatcttctttgaccagggttcccatcttcttctcttcatctctataanaagttaagaatacagcatatcataa

SEQ ID NO: 303870 - DNA, 370 bp, Glycine max
  unsure (1)..(370): unsure at all n locations
tataaatcaatatggaagtttgacataatccaacttttgcaatatgagattctcgaagtgttgtcattttaacctaatacaactttcatctttggatgattaaacattgagtgcttagtgtgcctattctttgcttaacaaacttaatttgtaatttgatctatatcgtattttctctttatgagagttatttgattgtaatcattcacacttgctgtttggaaagctagaatgacttagtgatccaagaatatttggatgttntccagttttacgatgagattaaaggtgtggtagaagtgattctaagaatacttattgtaagtcatgagtgccagagaataatacttattntgtagtcttttattga

SEQ ID NO: 303871 - DNA, 417 bp, Glycine max
  unsure (1)..(417): unsure at all n locations
agcttgtaacatgagttttatagatatggtttatttatttggttntaatttaagactacatgtgtttgttagttactgtgtgcaatattgtattgacagtgtaaaagtttggtgttactcatttaataaaaatgtcattgttgtattcctaagtaaattcaactgatatttggatgcagtaatgcttatcagccatcaggtttcagttttatgttgaatgtatgtatacttcatgcaatgtttatatttagtgtcttaagaagatgtggtgtaagtcaagtttagtgtgactttgtattacatcctttcttgtggttaaatggtatgacagtgtaatggtgcaacttttaattctgagtcatgataatcaacttctgaggctattatctataacacatcatcaatttgcatatgtga

SEQ ID NO: 303872 - DNA, 399 bp, Glycine max
  unsure (1)..(399): unsure at all n locations
tgtattgcaatcttgttctgtttgttaaaattggtgtctaattnttatatttaattagttntgttgctctaatgattnttttttccaattaaactagtggagagacaagcacatgtctgtccacatttttattttttattatatattaaaaatttatatttacaaaaagatgtgaaaatgaggaggatatgacagactatatagaanaatgatagaacgaaattaaaatagtttatatgagttaataaataagtaaatatttgtaataatcaatataaagaatactagcaggcataaattaagaaaataaaaataatttatttcgtattctagcctaatccattacaatgtggaccaattaaaatacggatcacttgtaacaaatcttaaacagcatga

SEQ ID NO: 303873 - DNA, 357 bp, Glycine max
agcttgtatttatttcttccttagtattgctttcccttggtatgtggtacattttgagcaattgagattatcaaccacggtttttatgacatgatactttatgaggagaaccacttccttggctcgatatatgttttcaacccatccttggacaagtttcgagtccttatagcacctgagtttacttgctcgaacttcatttgccagttttagacctgctatgagtgctttatattttgtttcattgtttgatgccttgaagtcaaatttgatggcatgctccaaagtgacattggtgggtccttcaagcataatgcccgcctcattttctttcacattggatgcaacatcaacata

SEQ ID NO: 303874 - DNA, 407 bp, Glycine max
  unsure (1)..(407): unsure at all n locations
tcacacnagataagtggataatccacatattacaaaatgttgactttcacattaccattccccacaacgaaacttgcagacaagattttctcaatagtttccctctcaccatctcacacaatccttctaataacaatagcaaacaagaaaagtgtcgatggatcaccttgtcttataattttttgagcgaaaaattcataaggatttcagcaacatcaaatggtacttgatgtcaaacatcccttaatccaatgaattcacttctcatcaaaacccaacctcttcatatagaacaagaaattcccattaatcacataataaggtcttcataatctcacttaaagataagacattgttttgtcctcttttctttatcaatgggatcattcaccgccaacacactatga

SEQ ID NO: 303875 - DNA, 329 bp, Glycine max
  unsure (1)..(329): unsure at all n locations
agcttgcaatgaattatattgtgtatgtacgagtctggtgtcaatctagacacacaaaccaaggccataattcaaaataggtaagatagaaatgatgatagtcattggcacaaacattgacttctgcaactgctactaagcttgcaatcaaagatattgtatatatagtaattaactttccattcagcaacacaaatttgctttatttgnncgcttaaatttgttagattgcctattcaatctgaaatgtaaaattctatcttacatcttttatttggacaatatgctacaaaagatgcgacaaagaagttnactaaaccttatattag

SEQ ID NO: 303876 - DNA, 318 bp, Glycine max
  unsure (1)..(318): unsure at all n locations
tgtaggattatggngtacccatcacatgtggtactaggtggcgtgtcggtcgatggtgcacaacaagttttccacatgcacaatgcgcgcataaacccaccatcctctgttgcccacctccaactgagctcacgtactcccacgtagcccatatcctcatttctctcaacaccgggttcccatcaatcctcccaagctttcacaacatncaagcaaaacatcattcaaacagcacaagctatcacagccaagataaacagagcgcaggcagaatactcttgccaaacaccaaccaaattacagcttttctcacttaaa

SEQ ID NO: 303877 - DNA, 380 bp, Glycine max
agcttcagactgctcaattgctccaggttgctgcatggaagggcaaaggtctgtatggtggtcagcagaggagcacaaaccacaaacccttgcgacaggtacagatttctgattcaaggccaactgggttaccaagttgaccaacgcatccagtttgccttcaagcttcttaatttcagatgatgcagatgggtttgtagctacctcatgcactcctctaatgattatggcatcatttctggcgctaaactgctgggagttggaggccatcttctcaattaaatttctggcttcagcaggagtcatgtctccaagggctccaccactggcagcatctatcatacttctcttcatattactgagtccttcataaaaatatt

SEQ ID NO: 303878 - DNA, 306 bp, Glycine max
  unsure (1)..(306): unsure at all n locations
tgaatctctttcaacttcttcttcttcttctttgtaccaaaagttntctgaagttttctggttttccaaaccttgaaaacttgtgctattcatcttttcattctcttctccctttgccaaaaagaattcgccaaggactaaccgcctgaattcttggtggggctctcttctcctttttccaaaagaacaaaggactaaccgcctgaattcttttgtgtctcccttatcccttgtcaaagaattcaaaacgacacagtctgagaattcttttgattcttcccattccctaatacaaaagtgttcaaa

SEQ ID NO: 303879 - DNA, 404 bp, Glycine max
  unsure (1)..(404): unsure at all n locations
agcttctttgaganaacttccttgagaagctagagcttagctacacacacccctctcataactaagctcacctccttgagaagcttccttaagaagattcctaaagaagctagagcttagctacacatacctctctaatagctaagctcacctccttgagatgagaagctagagcttagctacacacccnctataatagctaagctcacccccatgacaaaaaacatgaaaataaaaaaaaagtccttattacaaagacaactcanaatgccccgaaatacaaggctaaaaccctatactactagaatgggcaaaatacaaggcctagacgaaggaaaaacctattctagtatttacaaagataagcgggctcatacttagcccatgggctcgaaatctaccct

SEQ ID NO: 303880 - DNA, 438 bp, Glycine max
  unsure (1)..(438): unsure at all n locations
tatgctacaaacatctacaacagacctccttaacctcagcagctaaatcagccacaacagaataattatgacctctccagcaacaggtacaatcccgagtggagaatcatcccaaccttagatggtcgaatccttcacaacaacagcagcaacaacaacaaccttattttcaaaatgctgctggcccaagcagaccatacgttcctccaccaatccagcaacaacaacagcaacagccccaaaaacagcaaacagttgaggctcctccgcaacctttcctagaagaacttgtgaggcaaatgactatgcaaaacatgcagtttcgacaagagaccagagcttccattcagagcttaactaatcagatgggacaatnggctacacagttaaatcaacaacagtcccagaattctgacagattaccttctcaatctatct

SEQ ID NO: 303881 - DNA, 418 bp, Glycine max
  unsure (1)..(418): unsure at all n locations
ttgcttgtgctattccaagttcattaatcatacctttaagccagattgcttccttcactccttcagctagggccatgtattctgcttcagttgttgaaagagcaacaactgattgttgatttgctttccaattgattgttataccaaacaaagtaaacacatatcctgttaaggacttccttgtgtctacatttcctgcaaaatctgcatctacatagcctgtgactactgcctcgtgtgctgtcttcttgtaccttaaaccagctttcaaagatccatttagataccttagtgtccacttcacagtttgccagtgtgcgcttgcaggatttcccatgaatctgcttataatacttacagcatgagctaagtcaggtctgatgcaaccattccatacattatgcttncaacaccactg

SEQ ID NO: 303882 - DNA, 344 bp, Glycine max
  unsure (1)..(344): unsure at all n locations
tagtgatgcaagttcacaagctaagaattgtgtcatttctagaaatggaacataaacatcaaacttaaaataataatatgaaaaacacaatgagctcaagagtttatactgaagatgcaaatgtgggatgaaaattatttagatggattatataatttttcgactaaagaattaattaagactcattttataattntcttatgaaatttcatatttatttatcatgtaantaatttgaatgactcattatatngttttttcatcactttttatggtttttaggctttctaagtagctttaatgggatttttattcgtaatgaaaaataaatggtaataaaaatt

SEQ ID NO: 303883 - DNA, 420 bp, Glycine max
  unsure (1)..(420): unsure at all n locations
agcttcaagctgcatgtccaattccatttgatgaagccaatttgtggaaaggccaaagtggacctgagctaaaacagataattcaacaacaatttagaaacatcaggtattacttcaaactagtggaagtggactgagctctgtctagctaaatattatccattaataacttgcagggctntgttgtggcttagtctcttgtaagcatgcatcatactgctaaaaaatgacaattgattaccaatgattcgtagtaatgcttacaaaaccatttttgtggaaggaatcatagtatatataggttggattctatctaaaatcccatcattgatatttntagtcctacagtatggnttttcttttcatcttgagttntccacatactgatggatgctaaattggtttggtttatctggactc

SEQ ID NO: 303884 - DNA, 397 bp, Glycine max
  unsure (1)..(397): unsure at all n locations
gtcatccaatatatgcatgatgtcaataacgcacttagtaaacctatcacaccaatcaatcacatatgagtggcttgtgtacagactatttactctcaatgttttattctaaatagagacgtaggattgatttgctccattttttggactgatattaaatgtccattaaatattaacgaatttgaattatgcgtatgagttatgcaaatgaatctagccatatcatatatatatatagaacattacattacacgatgctaatcaattctccttcatcatgatcattacgattagcatgaacggcgtcagcttcttcttctccgacgacgttatgagtgatttgcacggtcaaaggactaacatangagtgcatgtatgaatcatcatcttctacatt

SEQ ID NO: 303885 - DNA, 230 bp, Glycine max
  unsure (1)..(230): unsure at all n locations
agcttatattgttgtgatnactctacaatactctcggtagtagctcttactagccatgaggtttggattacgagtgcactttgtgagagattattgaaaacgcatactcacatttaggtttaatgcagattcacggcttgccagctggactttaagagagatgataactccaaacatctaatatccgtatcttctatgtatgactaatgtactcaaacggtgccctctta

SEQ ID NO: 303886 - DNA, 309 bp, Glycine max
  unsure (1)..(309): unsure at all n locations
ttnnccgttggcacgngatgnggtgccacggaggacacaaactttttgactggatgcaagccttcactcgactatatctctattaccgactgaaacgggctggatgtggatcgatacgttagttttatgtatcgttcttctaaggctatcctcatctgaactggtacttattcacaatgtggctgggtagatatgggacacactgacgggtcatgtccccccagagtctccgatattacactcactcattcaactgctactatattcattataaatcatccaataaacggcatcttgcgctagaatata

SEQ ID NO: 303887 - DNA, 286 bp, Glycine max
  unsure (1)..(286): unsure at all n locations
agcttttagtatganatcaacttgatgatctatgcttgttgaaggtggcattccatgaggagtctacttgggaaagacatcttcttattcctgcgataaggagtgaacactatgagaaacataaatacgtaactgattaaaattatcactctctctatcttgtatatgacttcatctctcaagcgtatcactcttcctttctctatccctctgtgatgcctactattgtcactctcttgctctctcttttctatccttctgaatgggctatcacacacttctctaa

SEQ ID NO: 303888 - DNA, 258 bp, Glycine max
  unsure (1)..(258): unsure at all n locations
tctcctatttgtaatggagtggggtaccattactggaaaactcgtatgcgcattgttatagaggcaatagatttaaatgtctgggatgcatttgaagtagggccttatattcccaccatggttgctaggaatactacaatagtaaagcctatggaagattgcagtgacgaagaaagaagactaagacaacacaacttagaattcagcaacatattttcatctgccctatgaatggatggatactttanggtattcaac

SEQ ID NO: 303889 - DNA, 341 bp, Glycine max
agcttgtcatcaagttcttgatacaagaacacatatggatggcggtatatattaacttgcatgggctgtatgactgcaacatgattacactgaatttgttgtagtatgaccacaacaagttatggaacaaaactcagatataatttcttagaagccattatatcatgctctaattaaaattgaagctaagcttctataatgtgtattaaaggtattattagagaattatatgaattaactatgtgaaactttaatcttgattgaagaacgaacatcaaaatttgcatattaatcttatcctttttgatagattggttatggtgctattgtttaaacaatga

SEQ ID NO: 303890 - DNA, 389 bp, Glycine max
  unsure (1)..(389): unsure at all n locations
tatagaatatataataagataacaatgacaattgaagaatcgattcatgtttccattgatgagtctaatgctatttctccaagaaaggatattttagataatattgcagaatctttagaataaatgcacattcatggacaagattctaaaggaaaaggagaaggaagcaatgaagatcctccagtagaagtcaaagcaaataatgatcttccaagagagtggaaagcttcaagagatcatccncttgacaacattattggtgatatctcaaaaggggtaacaactagacactctctcanagatntatgcaataacatggcttttgtatctatgattgaacctaanaatttaaatgaagccataatagatgaaaatggataatagctatg

SEQ ID NO: 303891 - DNA, 374 bp, Glycine max
ctcggacccgggatcctctcaatagactgcagcatgaagcttttcattatttgagaataagcaaaaacctcaatgcccaacatatataaccttctctttctgctgggatgtgcctcttcctgctatgcgtcttcttgctgcataacacctcttcctcttcctcttcgatcatgaccacttcacaatgtcgtcgaagttcgacccctcccattgacgttttcatccgcataaccgatggcgaggctagtgcgacgagtacccctccacagcgtgagaatgaagagaacggctgagagtcttgatccgtcgagcgagaagatgagcataagaagagaaatgagcgatgtcttacggctgattcaaaataacatcat

SEQ ID NO: 303892 - DNA, 403 bp, Glycine max
  unsure (1)..(403): unsure at all n locations
ctaanatttgaattaaaacattcagaaactgctggtaatcgattaccatatatgtgtaatcgattacatagtgcaaattttgaattcagattttaatagctgttattaatcagttttggccactggtaatcgattacatcctctggtaatcgattaccagagagtaaatttcttgaaaaagactttttaacttaaatttcttggccaaaccttttgctacttcaattggaattcccttcctattaaatataccctttctaagactctagagactatcctgatcatccatcttgaatatctttaattcctttgtcttgaataaagctgtgagacgcatgtgaacctttggcatatcaaaacattcagcttgatcctttgtctacatattgggtagccatgaatc

SEQ ID NO: 303893 - DNA, 521 bp, Glycine max
  unsure (1)..(521): unsure at all n locations
tttgttggctggacgnacccacgagtgcgcatatacgagctacaggtcgagcgtgcggtacctcgtgggagtcctactcatgagtcgactctcgcagcgcattgcgtcatcttcgtacgcatatattaggactacagactatcataccaccactgtgagattcgttgactacatctcattgcaacgcatggccacttgtatatccaaggtatcatacctttcaccgacatgtgttatacaaccatccaagctattcctgatattacgaataacagaggaatcttatccacacatgtccatctacatcaacatgtctagcaccattgttcacacaggaaccaactgctctgtttgttaaccacgatgcatgacccgctacctatatatatgatcgttgacagaacaaaggttcagaatacataggatgttgcgtgtcatggaagagatgaatacgtggcatantgcaatgacacattaatcggatgcctattctgagacaatgactaactggccatccatct

SEQ ID NO: 303894 - DNA, 322 bp, Glycine max
gatggtgcctactcctttctctcatactttgccttccactgcatgagcatggaggttatctaccattgcacgaccggatttgagctttgagatgcttactgcctatgaggatccacacgcaagatcccattgatacccttggtgggtaggattgcatcgtgatgtgactactttacctttagacaaagccttgatttatgctcgttatccctatctttactacttgtgctgagctggaatacatatatggcgattcaggatgtgcccctgatctgtgttcatcttcatacgctttccatacattagcatggacctgttcaat

SEQ ID NO: 303895 - DNA, 241 bp, Glycine max
ttcttgtgactcttggccatatgttttataaactagtcacttataatgttgagacttttgaaagaatcttcagaaacaagacacttagagaattatgacttttggaaatgaatttttcgaaatcatacactggtaatcgattaccattaatgtgtaatcgattacacatcaacatatgtgactctgcattttgaattttgagaagtaaaacgttcaaaggctcatgtaatctattacaagg

SEQ ID NO: 303896 - DNA, 184 bp, Glycine max
gtttatatgacacactcgtgacatgccacgatgtatgttgtactatgcctccaagcgcatgcagcgacataacaaatgagtaaataccgctcgtatgagtgcagagagttatgtgttgaaatgagcccctttgctcacatcatactgctgcaaagcatgtgcatcgcctgctgtggtattggac

SEQ ID NO: 303897 - DNA, 375 bp, Glycine max
  unsure (1)..(375): unsure at all n locations
agcttaattctacacatganaaagaggatgagatagttgcacaaaagagaaagcttcctaacaaaaattttcatgcaggtggaccttcttctagtagttatgacttaccgcagcctcttatccctcttccattcccacctagagcaattccaaacaaaaaaatggaagaagcggaaaaggagatcttggagaccttcaggaaagtagaagtgagcatacctctgcaagatgccatcaagcatattccaagatatgccaagtttctaaaggagttgtgcacctacaaaaggaatctcanaggcaatgaaaggattagcatgggcagaaatgtgtcaacattgataggtanatctgttcctcgcattcctgagaaat

SEQ ID NO: 303898 - DNA, 313 bp, Glycine max
  unsure (1)..(313): unsure at all n locations
tgtaatcgattacacatatactgtaatcgattaccagagtatattnttagaaaatattctcaacagtcacatctttttatgtggttcttgaatgactatcaaaggcctatatatatgtgacttgagacacgaatttgcgaagagtttttcagaacaaaaaggtcttatcctcttataaagaaaaatcggtttatcctcttacaaattccttggccaaattacttatgattcaataaggaattatttgagtgctcanattgttcaatctatctttttcaagagagatttcttcttttcttcttcttcattctga

SEQ ID NO: 303899 - DNA, 446 bp, Glycine max
  unsure (1)..(446): unsure at all n locations
gaagctttgttttcataaaacatttaaaaaaatttcacaaccccaatccaatcctttntttgtggtatttatataacttcaaaagtttctatattctaaaattattgtcacttttgaatatattaggaatacacttgaggaatatggatctactgaggagttgctgagtatcattaatgggtctatcaagtctaccaattcacaaattcaggtaatcgacaataacttatggntataattatatacttgatgttttttttttatttctaattaattattctaaaaataagttacaccaaggatattttttgcaaccattatttttgggagttcttcccccatcaaaatatatgtgcaagagaggtgtgaaaaactcaaggcaaataatatggggagatgtagaccaatattctaaacatattanatgtagaggatgtgaatcttat

SEQ ID NO: 303900 - DNA, 302 bp, Glycine max
tacgtaagattgaaagaaacatacatatatatttgaaataatttatatttaaaattataagggatttttgcataactaattcaggtagaatttagatatataggaggggaaaatttataattataaagaagatacacataattaattcatgagaatttaaatttaacatttttaaagaagttaataatgatgagtgtagactaacgttattcataagatacttctatactctaatttcattcatacgactggagcagatgattcaaaacatgagaacttaggtgcaacatctataataatat

SEQ ID NO: 303901 - DNA, 184 bp, Glycine max
gtcagccgagacaacagagcatacgcataatactctgcctatacaccaaccacaatcacagctttgctcactatagaccctcaagacaatccttcatccaattcggtaccgtggatgcattcaaatattaccgcagcctgtaaacattagctactgtggaccgtggaatctactagcaactccg

SEQ ID NO: 303902 - DNA, 139 bp, Glycine max
  unsure (1)..(139): unsure at all n locations
agcttaaggagtgggctcgtgaaataggctatgtcaactatttaacaataaagaanaaattaaagccggactgaccctagcctagatgattntgtgggtgtttcttcatgtgaattttgagcattgctatgcgcaccca

SEQ ID NO: 303903 - DNA, 277 bp, Glycine max
tatactcgattctctgaacaccgggtcccggtcaattctcccaagcttcccaaacatccaaacaaaacgacattctgaccgcacaagctatcacagccaagcaaaacagagcataggcagaaaactctgccaaaacaccaaccaaatcacagcttttctcacttatagaccccagtaacaattccttcgttccggttcattaaccattggatcgactcgaaaatgttactggagatctctaatacttaagcctacattttgaccgctgggatctact

SEQ ID NO: 303904 - DNA, 359 bp, Glycine max
agctttgatgttgttagtcgtcatttggatgtcgagagtgtcatcttgttggattctgagaagaagatcaataaaatcttggtcctctaattcagctccatcttcttttgcaattttgttcttttcttgatgctctctgatgatggtttccaggaccttgtcaacctgcttgtgcaacttcttcaatctggtcatctttccagttaggaaatataagaatggaattgaaggatagacatcatcaaggtcgaatcctcccccggattctacgatttttcggatcaaagacaccacaaactcatcttgctccttgcatatgccaccgactgctatcctgtaaatagaggctcatatcaatg

SEQ ID NO: 303905 - DNA, 459 bp, Glycine max
  unsure (1)..(459): unsure at all n locations
tgaagaaagagtcatagatgcttttataaaatctataatttatagtttgtaattgcagtaggtattattgaactcatcacctcacgaacgaattctattaattattttaatacggttaattctttggacataaaacataataacttgcatttgaaggatcaaatcagtataaagtaaaataaaggaggtaaataaggagaaattgtttatctttgaaggacataatgagaaattgttaagaaaataatcaaatactactgcccagttagatactttgacttggtgcccaacagcaattagagtgcatcgacaatttctattttgacttagtgtgcatgtgcaacagcaattatagctttcaacggtcaaggttctcactgccacattaactattgttgaccaagtggcacttatatatctacaatagtattacacantatagaggagtaacgatgacat

SEQ ID NO: 303906 - DNA, 348 bp, Glycine max
  unsure (1)..(348): unsure at all n locations
agctttgagcatattcaaacgagaaataaatttgactcggatgtccgattgagccctgtaatatatcgagacgctcgtaattgaaaactgaagctttgagcacattcaaacgagaataaattntgactcggatgtccgattgagccgtaatatatcgaaacgctcgtaatagagaacgaaagcacgtagcaaattcaaaccacaataaattttaactcggatgttcgattgagttctataatatatcgagacacttgatattgaaaacagaagctctgagcagattcaaacgacaataactctntactacgatgttcgaatgagacccgtatatatctagaatctcgt

SEQ ID NO: 303907 - DNA, 322 bp, Glycine max
cttatgaacgattctggttttctaaaccttgaaaacttgtacttttcatccttttcattctcttctccctctgccatatagaaggcgccaaggactaaccgcctgaattctttttgtgaacaagagatggcacatctcttgtggatcagttctagtggagggtacatccactagggtttcaaagagaacaagggagggtacatcccttgcggatctttgcttgtaataagattcttacaaggttgaaagagattccaaggaccgcaggtcgctttgggactggaggtatgcactggttgtcgctgaactactgataaaactc

SEQ ID NO: 303908 - DNA, 416 bp, Glycine max
  unsure (1)..(416): unsure at all n locations
agcttatgctcttattgtacctgtatctttctttcattntgaatcatctcaagtttcatcttcggagcataaatagggacaattgtttttcaataaatcaattcatgaaatgtcaactacaggtagattattcttacttttacattctacattgaataaacaacatctgtgaattataaaccttatctaataggtttgagaaagcttatggatgatatgaaaacttataatcccaccgataggggttcttttacttatcttttatcagntagttcagatacattactcgatgaagaaagaatgtgtagttcttaacttattgcttgaaagctctnttatagacaagtcttttcttatcacatcggacaatgaactataagcgattatttagttcatatcttttaaagaacattcat

SEQ ID NO: 303909 - DNA, 298 bp, Glycine max
tgcatgattcacattctccacctttgtcaagcatattcttttttatatcatcaaaacctgcatgatttacattctccccctttttgatgatgacaagcattatccaaggcttgatctttatgacatcatcaaaatcttcatgatttacattctccccctttctgatgatgataaccacctataagttatgagcaacaactaagaaaacatatctatttgcatatagattactcccccttggttttggaatggttgcttatatgaaacaattgaagatttcatatttttcatatataaa

SEQ ID NO: 303910 - DNA, 433 bp, Glycine max
  unsure (1)..(433): unsure at all n locations
agcttgtatgattatggngtacccatcacatgtggtactaggtggcggtcgggcgatggtgcacaacaagtttttccacatccacaatgcgcgcataaacccaccatcccctgtagcccacctccaactgagctcacgtactcccacgtagcccatatcctcgtttctctcaacaccgggtccccatcaatcctcccaagcttccccaacatcaaagtaatacaacattcaaacagcacaaactatcacagccaagaaaacagagcaaaggcagaaaactctgccaaaacaccaaccaaaatcacagctnttctcacttatagaccccagtaacaattccttcgttccaattcgttaaccgttggatcgaactccaaattttactggaagtctctagtacataagcctacattntgaccgttgggatctacta

SEQ ID NO: 303911 - DNA, 435 bp, Glycine max
  unsure (1)..(435): unsure at all n locations
tgtaggattatggngtacccatcacatgtggtcctaggtggcggtcgggcgatggtgcagaacaagttttccatatccacaaagcgcgcataaacccaccatcccctgttgcccacctccatctgagctcacgtactcccacgtagcccatatcctcgtttctctcaacaccgggtccccatcaatcctcccaagcttccaaaacatccaaacaaaacgacattcaaaccgcacaagctatcacagccaagcaaaacagagcataggcagaaaactctgccaaaacaccaaccaaatcacagcttttctcacttaaagaccccagtaacaattccttcgttccggttcattaaccattggatcgactcgaanattttactggaaatctctaatacttaagcctacattntgaccgttgggatctactagcataca

SEQ ID NO: 303912 - DNA, 431 bp, Glycine max
  unsure (1)..(431): unsure at all n locations
agctntacatcagaatttagtaatgacccactaacctagaattaaaataacttaatgccattaacctagggaattaaaaaaacttaatggctgagtgtaactgaaattgtggcaaccaaaagtcacccccaacagccaacaagtcagccaccatttggtctcccaaaaggctgatgcctaggttgccaattgggcccttattacaacttgaactaaacctaactaaagtccttttagttgattaacccaaaacatatttttggtcagccaactttacaaggattgggccattatttagacaaactaaacactctataattgaaacaaagtggtgtcatttagtcctcctccatttgggccatgatacaactcacaaccttggacttttctccttgaaacttgngcttgtattcaaacagtatggacagcac

SEQ ID NO: 303913 - DNA, 452 bp, Glycine max
  unsure (1)..(452): unsure at all n locations
tcatgagagagtcaaagatcaaattgagaggaanaataaaagctatgctaaacaagccaacaaagggagaaagaaggttgtcttcgaacccggagattgggtttgggtgcacatgagaaaagaaaggtttccgaaacaaaggaaatcaaagcttcaaccaaggggagatggaccatttcaagtgcttgaaagaatcaatgacaatgcttacaaagttgagctgcccggtgagtataatgttagttccaccttcaatgtctctgatttatctctttttgatgcagatggagaattcgatttgaggacaaatccttctcatgagggagagaatgatgaggacatgaccaagagcaagggcaaggatccacttgaaggacttggaggacctatgacaagggctagagcaaggaaagccaaggaagctcttcaacaagtgctgtccatactatttg

SEQ ID NO: 303914 - DNA, 260 bp, Glycine max
  unsure (1)..(260): unsure at all n locations
agcttctcctctattntgctataaataggggaagaagtgaagaagaaaagggttcagccccttaggcacttctctctctttcgaatttgcttaggaaaattgtttccgtgaataaaatccaagccgaggcgcttccgtaacgtttccgtaacgtttccgtgagtaattacgcgaagattcatcgttcgttcttcattttcttcagtcttcaacgggtaagtacctcagaccaagcttttcaattcattatatgtacccgc

SEQ ID NO: 303915 - DNA, 176 bp, Glycine max
tctaaggattatgccgcgtatctgggaatgtatgattgaatgtgatatcagttgatttgtgcaccactagcttttgattgatctgaaccttggagatttcgagttcacattgtgggaattgagcgaacatattacatgataacactcatttaaatgatcatatcatgataaagtag

SEQ ID NO: 303916 - DNA, 330 bp, Glycine max
  unsure (1)..(330): unsure at all n locations
tagctntggaatatgaacagactgaagtatctactctgatctgtgactccaagcagttgaagaagttggatgcaataagatcaagactaatatctttacaaaatattatttactttgaagatgataacgaagaagatgctttctctggaagttcaagcggctggacaattgcatcttttagtgaagttgagaaacttgagaaagaaagtcctgttgagccaagcctgccttccaagaatgctattgcagttatcatgtacacaagtggcagtacaggtctgccaaaggtgtgtttctttatcaagttgtagagaaatctatctatgtgat

SEQ ID NO: 303917 - DNA, 454 bp, Glycine max
acgctattgagtgacaacacattgatagacgtacagaacgttattgctatcgtttagcgccttgacctcgttgacatgcaagcgtcctcaatcacgaagactggaacaaacgcgatgctattgatatagcgagataaatgaggctcagcacagtgactggtggaatccctagcggagcagactcatcgactagttaggccgcgagctatgcaagcatcaacaattttagtgaaagtacttcatgacatatatcggaactgactaacatatcagacctgacgcatgatcaaaccaaattcctactgcacttgtcttagataaaagatcatgggaaatcctcgtattctgtagtccgaaccatgagccactctatgtgcagaacgctcatgcgattggtcagcagcttgccctagtgaacgtgatctattagatgatgaatcttctgacaacaccg

SEQ ID NO: 303918 - DNA, 306 bp, Glycine max
  unsure (1)..(306): unsure at all n locations
agctntacatatttgttntanaatctatagcggcataactgcactgttaaaggtcaatcagtagatgcacattatgttgattcaaccagtatgtgttcttgccaggaaattgtgccgcttangaagatttgtcgccggcccgaaaccgattatcggttacagcaacttcatgctgtgaatgaggcagcacctgtggatcagcagaagactggcatggatccagcagcatatgttaatgccgtgagggctactactactgaaacagtgccaaagcagctgattgcagcaaacattcatatggagacg

SEQ ID NO: 303919 - DNA, 240 bp, Glycine max
gtgagccataatcctgactcaccataaaccttgtccctgtgtgataatgtccatccttaccctcgggagcgatgaagattagacgggaaatttccgatcggagcacaagagaaggagaattgcccacgaaagcaaagaaagaaaagattgaaccttccccagtcagacagtgcgagaatgcttgaaaagatcagagagaatgcttcccaatctgagcatgggagagagcataatgataag

SEQ ID NO: 303920 - DNA, 450 bp, Glycine max
  unsure (1)..(450): unsure at all n locations
agctntgcttctacttaggtcttaagtataacttactaagcataagtcaattgtgcgacggtggttatattgtatccttcaacaaagagtaatgtatagtcaagacaaaagatgacaagtcctttgttactaccaaatgacacaacaatctgcatgagattgatctaataggtctaagtaaacagaatgtgacatgtctgctttctagagaagatgagagatggatttggcatagaaaacatagtaatgtcaatttgaaacgtatttcataactttctaaaaaagatttagtgaaaggactacctaagatttgttggaaaacccatcttctctgtgaaggatgtcaacaagggaaatagatcanaacttattntanatctaaagatggtgtttccaccattaaaccattacacatattgcacatagatatgtttggaccaacttgaaccg

SEQ ID NO: 303921 - DNA, 338 bp, Glycine max
tagacgatagccacgtctcagaataggaagcatagagagtgctctcaacaagctctcaacacgttggatacttggttcacagacgaaagcaataacgttgacttcaagatggtttatgctatgaagaatgtgagaattatgaagtgtctgacttggaatggctctcacaatagggattcaaatttcccaacttgctagaagcacagggtctgtcatagcttgtgtatatgaggggaaccttttgcccataatttgtaaaagtgttctacacatgtgctaaagcagatatggaaggagacttgtactctactgtcaatggtgcaaagatggtcattgat

SEQ ID NO: 303922 - DNA, 246 bp, Glycine max
agcttgatgttaaatagtctaccagcaaatgtaaccaaacacgatatctatcatgtcaactaaatattctgatctgcaatgtagttggacccaagaaatattttctaatcttcaccaaatttcctttttctaacatgtacaagagacacataacttacccaaacccttgccatctacatggtctacttctgcacaggtgatcaattttatcactaaagcatacttaacagcatatggtttgagccg

SEQ ID NO: 303923 - DNA, 250 bp, Glycine max
  unsure (1)..(250): unsure at all n locations
tgaagganaacttgatgccttggtcaacctagtaactcagcttgccatgaataagaaatctacacctgttgcaagagtctgtggtctatgttcttctgcagatcaccatacagatctttgtccttatttggagcaatctggagtcaatgagcaacctgaagcttatgtagcaaacatttataatataccccctccatagcggaacctacaacaacagaatgattatgatctttcaagcaacagatacaat

SEQ ID NO: 303924 - DNA, 443 bp, Glycine max
  unsure (1)..(443): unsure at all n locations
agctntaacaaatctttctttatggngaatcaaccatgtttgcttcacgtagttaacaaacattggtcatgttgagcaagcaatttcaaacttcataaggcagtcatcaaactcttgcttagaaggacaatccaccagactttcccaggcttccatgacataatcccatgcatttttttaccaacaagggttttacatttttccttcacattcttatcaatgtgaaacaaacacaacaaattggtagactcagggaaaatagttttcactgcattcatcaatgctaaatctttgtcagaaacaatgactccagagtgtgtgcatcacgtctcanataaatacttcgaaaccattcttgagctcatacaacattgtttacacgttctccctccaagtaggaaaaagcagctgaaaatgtcatccctgttggtgtcacaccaaca

SEQ ID NO: 303925 - DNA, 454 bp, Glycine max
  unsure (1)..(454): unsure at all n locations
tcgcccctagttgcgcattgtgtgtaaatacatgatcctgtgtatgatgatcacggatacaaggcaaccagggaatgatattgatgtgtatcttacaccattaatcgaagacttgaaaaaattgtgggaagaatgagtagatgcgtgggatgcaaatgtgcagcatacattcacattacacgcaatggtgttttgtactattaatgattatccagcatatggaaatttaagtggatatagtgtgaaaaggcatcatgcatgtcctatctgtgagaaaaacacaagcttcatccaactcaagcatggaaagaagacagtatatacgagacaccaaagatttctgatagcttttcacccttattgatgattgaaaaaatcttntaatggaagtcaggagaatgaaggctccccagaaccattaactggaaaccaagttcatgatcgggtaaaggac

SEQ ID NO: 303926 - DNA, 437 bp, Glycine max
  unsure (1)..(437): unsure at all n locations
agcttaatacccataatcacatctacaggaccaaggtccttcatatcaaaaattttagacaagaaagacttcacatcatttatgaattgcatattactaccaaatatcaatatgtcatccacatacaaacataaaatgacacatccattatcatcaaattgtttcacatacacacatttatcagtattattgattagaaaaccatacgaaagaacaatttgatcaaatttttcgtgccattgctttggagcttatttcaaaccatataaagatttaacaagtttgcaaactttcttttctttccccggttctacaaagcctttaagttggctcatataaatttcttcttctaattcaccatttaaaaagggcagttttacatccatttgatgaaatttctaaataanaacacaagcaagtgcaattaagaccctaat

SEQ ID NO: 303927 - DNA, 457 bp, Glycine max
  unsure (1)..(457): unsure at all n locations
tgcctctagccagctgaatgttgccgagaggatcgaagaacttctcctacatgtagccaaccttgagcatgcatctaacccttcagcctcaccatcttcttcctcgcccaaccccgcaccaaacacaacccataacccaccaaaaatgaaactcaatgttccaaaatttaatggcaccgacccctctgggtgggtgttcaaaaccacccaattttttgcctatcactctacgctgaaaccaaagcgccttaccatcgcctccttcgctatggaaggccccgctcttacgtggttctagtggatgacccgcaaccaccagctcccgacgtgggtggcgtttttgcaggccattgagacgcgcttcgcccactccccatacgaggacccaacaggaatcctcttcanactcacacaacggngctcggntagcgattacctgcatcagttngaagctcta

SEQ ID NO: 303928 - DNA, 323 bp, Glycine max
agctgttccttttcagcatattcatatgtgacgcaacctacccttcagcgggagggcgacgtgtgactcacggatgtgtgtttcaacaaaggaatatgcacggagtcgccaccaacgtatatttgaagaaaacgtctgacaaatcggatgagacgtgatctacgaacttttagtgaaaagctccggagtcgcatttacgcacggagactgtattagcatcccactcgtacatcactagagatggcagccttatctcagacgtgcaaatatgacttaagtttatgactccttccctttatacattcttatggcgtttttatgcc

SEQ ID NO: 303929 - DNA, 460 bp, Glycine max
  unsure (1)..(460): unsure at all n locations
ngtctntctttggccctataattggtatcacaagattnttgtggctctgtggcccttcacttcaaaattaggagtagattatgcttgaatgaagaacatgtgttctgttcattaaatgctggattaatattcacttgctttacttgtgctcagtttgatattggttctcaagttgttggccagaaggacacgtcaaagaatgttctagacgtctggaaagaggtaacagacaccactcttttaaattgtctatttcctatccagtaattgcctaacagtactactttaaatttaccatctttagcattgcgtgatattctttgtgtagatattccacaagagaagaacaaacaagacggacagacaatctcatagaggcaagtcctttgaatttgactccttgtactcccttgtttcaaaccggtaggccatattttactgttttactcatttctccatc

SEQ ID NO: 303930 - DNA, 431 bp, Glycine max
  unsure (1)..(431): unsure at all n locations
agcttgcctatccgatgcagcagtaatgatggcccgagttatgttgggaaatggttacgaacccggaatgggtttaggcaaagacaacggcggcataactagcttgataaatgccaaaggaaatcgtgggaagtatggtttaggctataaacccactcaggcagatataaagagaagcatcacggatagaaagagcggtggtcaaagctcgcggttgaggcaagatagtgaaggaagcccgccctgccacataagtagaagctctataagcgcgggtctgggagacgaaagtcaagtggtcgcgatatacgaagatgatgttccaagtacattggaattggtacgaacatgccctcctgatttccagctgggaaatnggcaagtggaggaacgccccggcatttacgcaatgagcataatgtaaaccttta

SEQ ID NO: 303931 - DNA, 368 bp, Glycine max
  unsure (1)..(368): unsure at all n locations
taatctacatgtccaagcctcctctcccattgaacccaacactatcacccaggcccttcgcgaccctgattggcgctcagccatgcaagccgaatctgatgccttacaccacaacatcacttgagatcttgtcagtcggtcctctgatcaaaatttggttggctgtanatgggtatttcgaatctaacgaaatccagacggatcaattgatcgttacaaggctctgttagtcgccaaagggtttcaccaacgctctggttgggactatacagaaacttttagccccgttgttaaaccggtgaccattcgcattgtcctaactctcgcagttcgtcaagggtggcccatacgtcagcttgatgtcaaca

SEQ ID NO: 303932 - DNA, 313 bp, Glycine max
  unsure (1)..(313): unsure at all n locations
agcttataataatgaaaggcatgaatcanatgtgataaactggtctcaactagaggggatcccttttatcaaattctcaatcatagtaataataggcgacaatagtagcatcttcccttcgatccggagacgacgacatctccctaaagatctggtgatgatgacaacatatccacaaagatccagtgacaatgacaacttctgtgacttaagcaactttaacagcacattgtttgagccgaagtttaagagtggaagttgtgtcgtcgtagtcatggaggcgatagatgaagacgaagtcaaagctgtgact

SEQ ID NO: 303933 - DNA, 128 bp, Glycine max
tgtggagttgaatgcaaaggaggaggaagaagaacctcgtgttgttcacagctgagttggtggtggaatctcgtggttgcaaagaagaagctcattggtggtggagctgaacaatgatgaggaagaag

SEQ ID NO: 303934 - DNA, 190 bp, Glycine max
agcttattgtctactctttggtctcaggtgagcccataagtgtggtactagtataggaagaacggagtgagttgaggctagtacatttcgtgagccaagtactttacgattgagaaacgaggtatcgtattatggaaaaggtatccctcgcacttgttaacgtcgcccattgtctgtgctaatattctct

SEQ ID NO: 303935 - DNA, 282 bp, Glycine max
tgcttctacaccaaggaattcttaagaggataaaatgtttttactctttgagagaataagactttctgttctgaaaaaactcttaacaaattcgtgtttcaagtctcatataaatagtcttttgatggctatgtaaaaaccatttgaaaagttgtgactcttggaaataattttctgaaaatctcctctggtaattgattacaagatttgtgtaatcgattacaggctgtaaaatttgaataaaagacgtttattaactgctattaatcgagcaccactatt

SEQ ID NO: 303936 - DNA, 200 bp, Glycine max
agcttcagatatagatatattggcactgcagactgagaaagagcttgtatggagcttgtatgacaattcctatgaatagcattgtgagattgaataccggattacagaaatgcataatcgggtttgcatattgcgactacgagccttgtcttcatactgtgtctcatgcacacacttctcagttgtatctattataacct

SEQ ID NO: 303937 - DNA, 166 bp, Glycine max
tcaatattagaagcatttgaatcaagaaggccaagtaaatctctgattattttcattcttgcgggtgcatccttacagccagacagatatctgaaaatcagaggcaacatttgaggaagtaaaaaatgactacccttgcttctcaccctctccacgtggttatgtc

SEQ ID NO: 303938 - DNA, 442 bp, Glycine max
  unsure (1)..(442): unsure at all n locations
agcttgtaggcctaggatcttctttatcaatggactcctttacttcttggaagatgaatgacagtggaatggagaaggaagagagagagaggagatgccacttcaaggagaagatgagtctagaaggagctcaccaccataggaggccatggataagagcttggaggaagaagaagataaatgaagggagaggaagagaagaacacgaaattttatgctttacaagagctctaaaatctgaagtttaattttcaaatgatcaaagttcaaaaaaatacacacacatgacctctatttatatcctaagtgtcacacaaaattggaggaaaatttgaatttctattcacatctcacttacatttganattaaatttgtggagccaaaatttcactaattatgattagtggaatttagctatggttcagtccactagtccaagat

SEQ ID NO: 303939 - DNA, 456 bp, Glycine max
  unsure (1)..(456): unsure at all n locations
taaagtctcacgattgccatatcttgatgcaataattgttattcgtggccatacgagacatttttcctaacaaagtcaaacatgccataactcaatcgtgctttttcttcaatgtcatatgtagcaaagtccttgatcctgccaagttagatgagctagaaaatgaggctaccaatacattgtgtcagatggagatgtattttcctcctgtgttcttcggcattgtggttcacttaattgttcatctggtgagggaaattaaatgttatggtcttgtttatttgtggtggatgtacccgattgaacaatactagaagatcttaanatggtatacaaagaatctacaccgttttgaagcatctattgtgggaaggtacattgtagaagaagctattgagttttgttcagagtacattgaaaaggcaaaacttgttgtgcttcccaagtctcgacatg

SEQ ID NO: 303940 - DNA, 435 bp, Glycine max
  unsure (1)..(435): unsure at all n locations
agctttgaatggaagaatatcccaacctatgttagtaagagactaatagtatttttatgtacttcttgacattcccccccttaacgtaataatcaacaagaaacaaactttcttcttaccaaacaaagaagaaacaaactttctgttgtacctctatttttattttattgaggtaacccagtactagctctgatcacatcatcaccatctgatgggaagcgtaaatgttgatcaattgacaaatacaaacacgttatgtgatgtataaagtgtgaatatttcatttataataagttcaagcgggtgtttatctttttggtatgaataatcatatgcacaatcctgagaagttgangcacgaaaccatgattatctaagatacactgacagaaataattgaagtatataactctttgattaatcatatacggaaca

SEQ ID NO: 303941 - DNA, 330 bp, Glycine max
  unsure (1)..(330): unsure at all n locations
tagcttgaatctgacatccgtgtgaaaagttatgaccatntgaatttctcaagagcttccgttgttcaatntcgagcctctcgacatattatgcacccgaatcggacatccgtgtgaaaagttatgatcatttgaatttctcgagagtctccgatgtttaatttcgagcgtatcaatattttataaccgcgaatcggacctcactgtgacaagctatgaccatttgaattcgacgagagcttccgttgttcaatttcgaatatcactatatgtgatgcgcctaaattggacattcgagataaaagctatgaccattaggatgtctcaaga

SEQ ID NO: 303942 - DNA, 244 bp, Glycine max
cataatataacgacacgctcgaaaataccgattgaatctctcgtgacactcaaaaagtcataacttgccacactgaagtccgattcagtcgcataatatgacgagaggctcgaaattgaacagcgcacgctcttgagaaattaaagtggtataaccttttccactgaagctctcatgaaagacaaatggtcatacctcttcacactgatgtccgactcaagcttataacatatctatacgctcg

SEQ ID NO: 303943 - DNA, 410 bp, Glycine max
  unsure (1)..(410): unsure at all n locations
agctntataagcgcgggttcgggagacaaaggtcaagcgttcgcgatatgcgaagatgatattccgagtactttggatttggtacgaccatgccctcctgatttccagctgggaaattggcgagtggaggaacgccccggcatttacgcaacaagcataatgtaaacctttacggttttaaaagctctatagttgggcctaggctttagagtttttccttttgttaaggctttgagtcttttgtttttgaatttataatacaaggatctttcttcatctgttcctggtctctacccattctcattcatttgcatgtttacttctttttctgaaacggcagatccgatgacgagtcccccgaagtactaatacctgggacccgtctatcgacttcgagcaagaaatgaatc

SEQ ID NO: 303944 - DNA, 343 bp, Glycine max
tatcagttaagattatcacagaccttgtatgcgtctcactgtcttcaaaaagatcatttttactattttgcaagtcttcgtaatctttatgtagaacaacatggtttgtctgaagatcatacctttcttcattaagctaatcttgcaactctttaagtactttcaacttattttgaactacctcaatctttgtgtctacatcatgagagttctataataagatatccttttctttggatagctgttcattttcaagttggagcatgacttcggaattttgcctttttacaaatcattgcttattgaaatagattataagacctaccattttttcttcttaaca

SEQ ID NO: 303945 - DNA, 398 bp, Glycine max
  unsure (1)..(398): unsure at all n locations
agctntgtcttttcttctatctttntctctcaattgttcttcattcttcttcatcttttcacttttgttccaccattttcttacacaaatttcgtgttttctctattggtgatgatcatggagggttaaacaattaatcaatccaaggatccactgcaagcaaagctgaatttgagtcctggtttggtttttctactctgtgtgaatgttcttctttctcttcaatcctattttcatttttcatgattgtgactatgttcatgattgaaaattgattacgttatggattcatttcctaatttcaaaatntaatcacagattgttaggatgatcttncaacataatttgtgagttcaaacaatttagagatttgattcgattgaacttctctaatgcat

SEQ ID NO: 303946 - DNA, 191 bp, Glycine max
  unsure (1)..(191): unsure at all n locations
tacacaagcattcattagtccaacacacactcaacaaatagttatcatccatccatagntccaatcaatcatgctcagtatgatgcatgcacctaacctcaactctcaaatgcaatgtggtaccatccccaaggaaatagcctaagcgtgtccacacgacactctcacttatgaaaactatgcagtaagtg

SEQ ID NO: 303947 - DNA, 247 bp, Glycine max
agcttgcagtatattcacacgagtcaaaagaaactgtattttactgtaacctcgagtgaatatacagtatattaactttaggctaccataaaatcattttctcttgaatgatgatatatactcagcacatttgtagaatctattttagaataaaaaaagggaaagaaatatgaaatgtgcatgatgtgtgatataataaaaagagatgacatgacagacattactctataaattagtgtatgtgtcc

SEQ ID NO: 303948 - DNA, 262 bp, Glycine max
  unsure (1)..(262): unsure at all n locations
tattgttcccactaagtctatgcctcacgctgagagcctggatgagctaagcatgcctcttcagatttctaattatgctcttttggactttattttactcattaagcatcataaattcatcaactnttaatgttttctacgcaaaaacttaaatgatattaaaataacacttattagcccacaatagaatatatatgagagaacctcacctacattgattaacctcactattcactcatattttaactccaaaatacactca

SEQ ID NO: 303949 - DNA, 382 bp, Glycine max
agcttggatgaagaatgagatgaatgaagggagagggagagaagagcacgaaattgtgtgctctaaaagagctctgaaatctaaagttaatattcaaatgatcaaagttcaaaaaaatgcacacacatgacctctatttatagcctaagtgtcacacaaaattggagggaaatttgaattttaattcaaatttcacttgaatttgaaattgaatttggggagccaaactttggagccaaaatttcactaattatgattagtgaattttagttatagttcagcccagtaatccaagatcaattccaagattctccactaagtgtgcttaagtgtcatgaggcatgtaaagcatgaaagacatgcacaaaatgtgactatatga

SEQ ID NO: 303950 - DNA, 442 bp, Glycine max
tataagaacagaattgcctcaatcattgccaaatatgcatgttaattattaagcatcaacaagaatcaatccaacgctattgtgcaagcaatcaatggggcaaaacacaccaaatgattatgatgatggatggctcaaattctcacaaaggtaaactcatcattttcaaattgagatttcaaaactatcatgacatgtagaggagaatcgaggatttcaagtcacagaatgtcaagaacttttattttcaaaacaattacccatttcttgaacatatcctataattcaaagaaaaacatgcaaagtcgtacatgcacacaaattgacccaaaatattaaactaaaaattcgacgaaactaacaacattaacaaattaacaaaaccaacaaaaatagcataaccaaagaacactcctccccctcatacttaagcaacacattg

SEQ ID NO: 303951 - DNA, 255 bp, Glycine max
agcttggaatgtagtcatacctcacagaatatatatatttatgtttaggtagtgaaaataccttatatatgcatgtatgtaacaaaaaaatacttcacgaaatatatatatgtatgtttaggtagaaagataccttggatatgcatgtatgtagcaaaaatacttcacaaaatatatatatgtatgcctaggaagcaatataccttgcatactcatgtatgtaacaaaaagatatgtcacaagatatatatatat

SEQ ID NO: 303952 - DNA, 180 bp, Glycine max
  unsure (1)..(180): unsure at all n locations
tccacttattagtgcacagctccttcaagaatttagcatatcttgtaatttgctntattgcatccagcagaggtatgtttacctgtacttttctaagtatttgcaagatctctntctctgcctcttccatttttttgttggaaactgcttttggaagaatggaacaggaaggatgtgctg

SEQ ID NO: 303953 - DNA, 371 bp, Glycine max
  unsure (1)..(371): unsure at all n locations
agcttgtacatctctgtttctctacctttcatcacanaccctggtggttgagtgacaaaaacttcttcttctagtgagccattaagaaatgcagattttacatccatttggtgtacttcccagcaattgaagctagccattgctattacaagtttcactgtttccaacctagcaacaggggcaaatacttcatcataaaccagaccttgcttttgcaaaaatccctttgcaaccagtctggctttgaactttgttacttctcctctacgattcaacttagttgtgtagacccattctactgctatggctttctttcctattagtagctatgtgagactccatgtcttggttctctcaatagacctcaactc

SEQ ID NO: 303954 - DNA, 367 bp, Glycine max
tatcgattcatactatgtaccctcggtggtgcacattgcgtttttcgcatatatattctcgacttgtttactctttataccccctgttgacgtgcttaagccagtttgcttaagtcatatctcgcttaacttaaaaataaaatcaattttcaccgaacgcttgaattgtattatgcgctaacttcggttatgatgaattccgaccagtcggtcgtgcgagtaccacgttggaaatcaataaagatgtataatatagtatgatcatcacaacaacatcttttagtaaaataaagcggaagatcaatcggacgttatctctatgagattcctcattcttcatccgaatgattaataactaaagtgaaac

SEQ ID NO: 303955 - DNA, 229 bp, Glycine max
agcttattcacaaatgtgttgattggtttccataatctagatagaggatcgataaacaaaactatggagattagtgtatcttataattacctcaacagtggccatttggaatgcaaagagggaaagtcataatatgatgaagtatgaactatgaaggaaagctcggaattaaagacagtggttgtgactttacctctagttgaaagaggttatttatatatgatactat

SEQ ID NO: 303956 - DNA, 480 bp, Glycine max
  unsure (1)..(480): unsure at all n locations
ntgaacttgtatcgctgcattacggacctatgcttactctgcttgatgtctcatgacacacttgatttacaatctctgcgttcatagtggctggaaatacttatgccgatcctttaggaatgagtccacgtataagaacagaattgcgtacgtgctctagctgtttgtgacctaatagaatccatggcatgatctagtgatggattacactcttatggcatgggatctctagactgtaaactctctttggttaaaggctccgtacgcacctcatgctctctatgcactatagactttctcgataacacttataangaatgagtaaacactatacacatgtttctggagccttgtatcaagatcgaggtttacgcatgtcgttaccagtatactgacatgagatgctcactattgtatagatgtccgataaatgtgatactattatgacacttgagacgtttttacagttgcgagagtttn

SEQ ID NO: 303957 - DNA, 435 bp, Glycine max
agcttgagctcactgttgctgctccataaagctccacggaatttgtctcggccatgctcttccttacgagtcctcttcgtttcttgttccaaggctttggtggtagcttcatttatatctctcagttcggcattctcctttcggatcttcagagctgctaatttgaacctctctttgactatttgggcttgctcgagttttgccctaagggcctgcacctcttcgtcttcctccgatgcctccacttcctcccttttaacggttctcaaactcgggagccaatccaaaccttgcacgtgggctttcaaccacttacggtagccaccgatgggcccattgttactacccctgagttctttgtccttcttttgcaccacctcccatgcctggcggaccttctgaagtgtttccacgtcagttctattgaaacctcgt

SEQ ID NO: 303958 - DNA, 419 bp, Glycine max
  unsure (1)..(419): unsure at all n locations
nngcatattttttctactcttctgttnngtaatttaattttcctttgttttccaacattaanataattaagaaatatattctttgttatgaataatcttttggtgaatgttcatatctatcgttatcttttttttgttatctttatttgcattaatttttttaactctctcnattacctttgtatctataaatatattactcatctttaaatgagaatacacaattctcattctttctaaactctccttttctctaatttttttttctctattattttcctccaattacattatatttaanagttatcaacacgatcgtcttttattcatttagcatattttctcattaacatctcgacttgttagaaaaaaccttgtagacaattntatcanaaaggtaatattttcacattcatgtt

SEQ ID NO: 303959 - DNA, 440 bp, Glycine max
  unsure (1)..(440): unsure at all n locations
agcttcatgatgaatcaacaatgattcanaagtgttttgatgataagaatgatgacaacaaaagatgatgacaaagaggatgaacaaaaatgtcaaaagatcaaagaacaactcaagtgaatcaaagaacaactcaagtgaatcaaagaacatctcaagtggatcaagaacaagtcaagagtccaagaatcaagaagaattcaagactcaagaagaaagcctacaatcaagaatcaagattcaagaataaagaaaggactcaatcaagataagtattaaaaagtttttcaaaactttgaatagcacatgagtttttgacaaaacctttaccacagagtctttactctctggtaatcgattaccatattgctgtaatcaattaccagtagcacaatgagtttgaanaagttntcatactgaatttacaacattccaattat

SEQ ID NO: 303960 - DNA, 259 bp, Glycine max
tgcttgtggagcttctatggaggttggatctttgagcttcaatgacgtccttcaatggtgatttttcaccatggagatgcagcggaaggcaaaggagaagaggagaggggaggcaccatccactacggaataatccaaggaagaaggagcttcaccaccaagaattgccttggataaaaagcttgatgacgatgctttaatggaggaaaagaaagagagaaggggggagcacgacattgatcgaataaaagatggaaag

SEQ ID NO: 303961 - DNA, 406 bp, Glycine max
  unsure (1)..(406): unsure at all n locations
agcttgagatgatgaagtgttgaagggtgaaacttcctacttttattgttgaccacagagtggtacctggagatatgtcgcggaggtcatgagaccttgtggacgtcaggtggggtgctattgcctaaaaccaagcttgaccaatcccgacccaacccgagcatagttggtcagtgagaacctgtgatgtacctaagcaggcgagctcctggaagtcaacagataaaaggaacaaagaccacaaagcaagggggcttgtggtggctggccagctgtgaattntgtgtgatatatgattatggcctctggtaatcgattaccaacggtgggtaatcgaatacaaggcttaanattgaagacaggaggctaagatggtctctggtaatcgattaccacggggtggaat

SEQ ID NO: 303962 - DNA, 382 bp, Glycine max
  unsure (1)..(382): unsure at all n locations
ntatacaagggagcaaaagatacaagtatcattcaaggtaagctatttggtcaaaagagcttgtgtctatacaattcatggccttcatcatgttctgagttatacaaatcattctataattcctaagctagttttaaaagttgtctatcctatggttgaccaaaataacaaagataaggatcatgaggaacttatttggatcgctgatacaattgacctaatgtagatgttggattagatgagagagagagagagagagatgatatggtttatgcagaattctccaactgtccctacactcagcacttgtcattgtgctgaagttacacttaaccaatgctttttcgacgctcccgcttagcgaacgctttgctaagtggga

SEQ ID NO: 303963 - DNA, 405 bp, Glycine max
  unsure (1)..(405): unsure at all n locations
agcttgagagttgagacatatgtcatgtgtcaaccttgctctagacttctaattatattgctccctcactttttctgaggtaggacaaacaaatgcttagatgtatgggttagggttattgttaggatataaagagaagggaaagttagtggcgaaccgcaaacatgaaaagagaagaaggtacaacgctacttgaaagaggttatcgaaataggctaatttttaaaagaaattttgtaactaatcttttacattgattcttaaaaaaatctgataaaaaaaatcagggaagtgtttgatgcgtgtccagttgtttggagaagtgtctgtggcgtgtccaagcccaaaangataattggcactgcaaaatgtgccacacaatgtccgcatgtgtctatgagtgtc

SEQ ID NO: 303964 - DNA, 434 bp, Glycine max
  unsure (1)..(434): unsure at all n locations
nttgtgtgaaaggatgtgactcttcacatttgaatatgaatttcaacgttcaaaggcactggtaatcgattaccaaaacattgtaatcgattacagctttttgaaaataattggaacgttgcaaattcaatttgaaaactttttcaaaacaattttgctactagtaatcgattacaacaatctggtaatcgattactagagagtaaaaactctntggtaaaaggttntgtcaaaaactcatgtgctattcaaagttttgaaaaactttttaatacttatcttgattgagtcttctcttcattcttgaatcttgagtcttgaatcttgatcttgattcttgagatcttgaaccttgaatcttgattcttgtctctagactttcttcttgagtcttgaattcttcttgattcttatcttgaactcttgaattgttc

SEQ ID NO: 303965 - DNA, 158 bp, Glycine max
tagctattgctgtagacaggatatgatatgcaatccgggatatatctacctcaaaggtacatgatgcctgagccagtcatcccatttaacccatgcacatttatcttgatcagtgtctccaccaacaacgaacctactctggataacccccgagtgga

SEQ ID NO: 303966 - DNA, 332 bp, Glycine max
atatgctccgttgttgtacataataatacaaggttttatactactagaaaagggaaatcactacgatcaatatattggttgattgattagatgtcaaacgactccattgccgtcactccaaaatcgttaagtgactcaaatccacattacgtacactttgacggagtgcctcacaagatattacaatagactggatgagggctcatgagtgatcacagtctgtcacaaagagacaagcgatctgagatgtccacagagaaagaaccagctaacaaataatccaatcagactctctttgcaggaatgggaaagaatgtctgagcattacacaa

SEQ ID NO: 303967 - DNA, 419 bp, Glycine max
  unsure (1)..(419): unsure at all n locations
agctntangagaaaccataaaaactaaggtagttcctaaacaaaaatcaattgaggaagcttcgccaagtatccccattgaaaaacctttattcaaacctttcaaagttagtgagaaggctaaacgaaaaattagggaacttagaaaaactaaatccttaactgaaggcgtaggtgacaatcatagtgaattactaaacaagatcggtagtttacttaaggtcattccagatactccccaagcctcggaaaatacttcccaaatggtaacaagaagtacctccaaattaattaatgttattaatgaagatagtgactaanactcagataccacaactgagatagggtcaatgtcagaaaagaatataaatccaattaattccaaacactgganaacaccctnncaaatatattatcaac

SEQ ID NO: 303968 - DNA, 277 bp, Glycine max
  unsure (1)..(277): unsure at all n locations
ntgtggttactgtatcctaattgccacatctgtctataacagtctatataactgctgtataagtattaaggattgaaggttcattacattgtacaattcaggatcaagtttgtttatcaacctttatcatgaaaatctgtgtttgttcattgacatgctacttgattgcttactgtacaagattctctcgaggatgctcatacaactgattgtttgcangtctcttttggtggaggtattggtgcctcgcatgttcatacaataggtctcagcttta

SEQ ID NO: 303969 - DNA, 442 bp, Glycine max
  unsure (1)..(442): unsure at all n locations
agctntntggttntaaatgaaagggttttctctttatctattattttattcaagctatgccacatgtctccatttgagtggagcaagaagggcccactttccctttttaattgtgactcatactcagccacaaacagtgagaaaaatctgacctttgaaacgctaaaatcctgcctcggtttgcatgccgtttctctggttccagttcctcgcgtttctctgcgtccgtcggggccagttttcgaaagcaagcaatatatatatcaaaacgctcagaataaaaccccgagcgtggntcagaggttggtttcgttaaattctaagtcgcacggcaaacgatgaattttnactaattaattaagaaataacccataacctcccagttatggattttctcttcttaattagcctaacccgcgtatcttgcccncactactcctat

SEQ ID NO: 303970 - DNA, 377 bp, Glycine max
tgaatgagagcactaacaacatttccttctcttttgccaatgttgacacttcattatggacacagccatggttgcttcaatactttatattcacgtgaatcccaatatatataccaattgacgcggattccttctgaacgggaacggacgtttcagagcatcaccgaactgttcaagagtgacatcagcatctgcctcgatgaacatgacccgcttgagagtctatctcagataggatcttactctcgccattattggggatattagctacagatatgtcgtgtgactcatggaagatgtgcagcgctattgtataaacatggaatcgacaatatccacatgtgtggataaaaatcttggacgcccaccagatccta

SEQ ID NO: 303971 - DNA, 407 bp, Glycine max
agcttgtctcattgtttatgcgagacagagaccaacatgttagccatcgtcagcaagtaccaagaagaattaaatctagccacggcccacaagtacaaagtggtgaacgagtatgcccgagtgtatgcggaaaaggaggctagaggaagggtgatcgactcgttacatcaagaggaaacaatgtggatggaccgatttgctcttactttgaacgggagtaaagaacttccccaattgctagccacggctaaagcaatggcggacacctactccgcccccaagcttctcagctcgtgctagggactcttccaattcagcacttgtacaacctagagcgcccgcgcccatccagagggaggccccccaagctccggctccaaccctgactcactcggccagcaacgccc

SEQ ID NO: 303972 - DNA, 440 bp, Glycine max
tgaaggtgtgtagcccaccatcttttcatagtagaatactggtaatgtgtctactatcattggtattatttttttctccgtcattgaggtgccacttgagctgccaggactctccacctttgggcgtattcttttgaaagattcgtgccccccttttgcacatgttctgtagttgcatcctatctgaagacattatactgacactgcctaacgaaggcaaccactaggtccttccaagaatggactcgggaaggttccaagttagtgtaccaggtaacagctaccccagtaagactttcttggaaggaatgtataagcaattcctcatcttttgcgtatgcctccatcttctgataatacatctttagatggttcttggagcaagtagtccccttgtacttgtcaaagtccagcaccttgaatatgggaggagtgatgat

SEQ ID NO: 303973 - DNA, 443 bp, Glycine max
  unsure (1)..(443): unsure at all n locations
agcttgtgactcatagttgtgctaagccatattctgcccctcctgngcaatatgacaaccattttgggggatagaggaccggtggattcaagcccactagtggacgacttcacccaactggtgggagttctcagccagttaacaaggtgtcttaatctgttggtagaagtggtggtggtcctgctactgtgtctacaccactccggtgtgggaagtgtggtcagcttggccatattgctcattagtgcatagatagagaggtgacttactttaactgccaaggtatgggccacattagcaccggttgcccaaaaattgatcttctagggattcctacacatgtntattctaatccccgagcacaagtaactcatcctttatcttgatgtagtcgctcaagtgttctctattagcaatggtgacatttctggtgctctagagct

SEQ ID NO: 303974 - DNA, 436 bp, Glycine max
  unsure (1)..(436): unsure at all n locations
nttgtgaatgtatgtatacatgantttgatgatgccaaagataatcgtcttctcaagtttgatccaagtcaagaattcagaaattcataaaataactccccagagtcacaactcttcagaaaataactcctgagagtcacatctgttcaagagatttttgaatggacatcaaaggcctataaataggtgacttgngacacaaaatgaatgagagagattccaagagaacttcattctcaaatgctctctcaaaagaaactcttgggcaaacacttgcaaatccattaagagttcatccatggacttcaattgtaatatccttctcttcaagagagaattcatcttctttcttcttatacaaagagattgattaagggaccgagggtctcttaagttgtaaggattcctgaacacaagggatgggtngtccctgtgt

SEQ ID NO: 303975 - DNA, 442 bp, Glycine max
  unsure (1)..(442): unsure at all n locations
agcttcaggttgctcattgactccagattgctgcanagaaggatagagatctgtatggtgatctacagaagaacatagaccacagactcttgcaataggtgcagattttttattcatggcaagttgagttactaggttgaccaaggcatcaagttttccctcaagctttttattttcagtagatgaagatgaatccgtggccacctcatagactcctctaaggacaatagcatcatttcttgcactgaattgttggcagttggaagtcatcttctcaatcaaattcctagcctcaacaggagtcatatcaccaagggctccaccactggcagcatcaatcatactcctttccatgtagctaagtccctcatagaaatattgtagaacgagttgctcagaaatatggtggtgaggacaacttgcacacaatttcttgaatctt

SEQ ID NO: 303976 - DNA, 449 bp, Glycine max
  unsure (1)..(449): unsure at all n locations
ntcatctagccaagattatacaaaggtgttacaaaaggacctaccgattcctaattatatgggccatcaaatctatcatgtgttgacagtaattgattagcccatgaatctcctcggnggcagtacacacttcggccatggcttttgctttggctaatagacgcgggaggtcttgactcccattcaaggtcaaggcgaatctatccatccacatagtcgcttcttgatgcagcgcatcaatcaccctccctcttgcttctttntcagcatacacttgtgcaaaatcctccactagcttttgttcatgggccatggactagttcaattcttccttgtatcgccctatgatagccaacatgctttgctccgtggcttcaagtgttgagccaaactccttttggacttgcgcaagcaactaactcttcttttaagatcatgccatgcacccg

SEQ ID NO: 303977 - DNA, 304 bp, Glycine max
agcttgtgctatcctcaccatataagctggtttcatggggttgagtttggccctaagctcaaattcttgtagcttatttgaaataacatgtgcaaaggtttgggactttgttatttgtttaatatgccagagtacataagacaaaagaaaagttaatgttttatctgacaagcgtttcctgtgcattatgtatgtagaatacagatgatgctcaagattcttaccataaatgcatctcctatgtttggcctatggtgctatactgtgagtagtatttagatgttagtataggcccacagtagat

SEQ ID NO: 303978 - DNA, 459 bp, Glycine max
  unsure (1)..(459): unsure at all n locations
cgtgagcaggctcttattgtgccacaaacctagtgtaacantttctatgtcgtatatgtcggacaaggcatgaatggaatgtacatgatgtattgcagcttggaccaacctatcgtctagcattgacacctcagccgagtgtatcaaatgacatattgagagctcacttgaagtctgtctagcacgcctgataggctatcaccgataagaagatttctctaaatactatgaattaaatggagaattggctagaattcccttcccacccacacctcatggactatggtntnggtattgattacccaatacattgtaatgtgaaaaccatacataactaccgcgcgctagattttgctctcatcgaggtatacatccacgctttctcatatcattatggagctccctgtgaatattggacatatacagagctgtgcgggccagacctatatatttatctgc

SEQ ID NO: 303979 - DNA, 197 bp, Glycine max
agcttgatatgatgaattgctgaacggtgaaacttcctgcttatattggcgaccacagagtggtacctgtagatatgtctcggaggtcacgagaccttgtggacgtcaggaggtgtgctattgcccaaaaccaagcttgaccaatgccgacccaacccgggcatactcggtcagtgagaacctgtgatgtacctaat

SEQ ID NO: 303980 - DNA, 301 bp, Glycine max
gtgtctatacaattcatgaccttcatcatgttctgaggtatacaacacactctagagactcaagaattatgccgagatcattattcacagatagtcattcactcacagagtaaggtcaaactctcaccgagttttgggtcaagctcttctttcacaactagtctatctagtgactaaccattctattataagctcacactcttgctctttctttgtgtaacatacacatttgctcaactcatgaaaagaaacaccaactaccttccaatcatgcactccattctaaataaagacatacacc

SEQ ID NO: 303981 - DNA, 419 bp, Glycine max
agcttttccttggatgaaagtgatgagtcatccataccaagagcagatagtggtgaatccaattcatcaagttcatcatcactggtatataactttttgagcacaaatgacccagttcttagtgaagttttgtttcccacttcttgtagcttgcccacaaccgaagaagctggaggtggtgcatagagcgtgaaaccagcaggacatggaaagcttgtaatggccccttcaccatcctgaatatcctaaaataagaaaatccaataaaacaatccttatgtggacatagaatgtagacattgcaataatcaactcctacaccacagttcttatgagtcacgagacatgctagcaacaccctctccgatattctcttttagacattcttttactatagttctaacattattagaaagtac

SEQ ID NO: 303982 - DNA, 448 bp, Glycine max
tcaccagtctgatccgtcagtgacagttgttaatcacactactatgtactctcttatactgtgctctttctccttgctctttctcctttcctgtaaggttgtcaaactcaagagttgggtaaactcatggagaaaagtaaacatgaatctaattttgtagaagtttacatgcattaaaaattcatttaggaaatatatcttagtacccaaacataattaaatggcatatccataatcgatattgaatattcaacataataaagcaaacaaaagtaatgaaatgaaaaacatatctcaattctggaaactgttatattatactagtccagtgaaagataaaaaaaaacataaaattagcttcataaactaaaatagaacaaaaggaaaaaaaaatgaaagataaaaaacataaaattagctgcataaacttaatacaactcacagaata

SEQ ID NO: 303983 - DNA, 371 bp, Glycine max
  unsure (1)..(371): unsure at all n locations
agcttattattatgtttattctaagttatgtttgattntctattttttttaaagtatttattataatgttatatttacaacaattaaaaaaattaacagataaataaatttatcatatttcttttacttttaaaactaaaattttaattttaatcttttaaagacaaacttgtccaacactaaaacataagaagaaaatagttattaaaaaataaaaatgaaagatctttactcctgattcaatgattcgggtcttacccgcgtgaatcctgattctgaatctggaacagctgctcccgtccgatcggcatgtaatgttctatcatgaatcactcactgacatgtatcttatcattcgtgctactattatc

SEQ ID NO: 303984 - DNA, 297 bp, Glycine max
  unsure (1)..(297): unsure at all n locations
tgnaaatcgactaacagtagcaccggtaatagttntcttttgtgccaaactaatttgaaattcctagtacttcatgaaaatgaatttaattcctgtaagattgagacaggtttgattgcaattttcaataataaactcttatctgatgcaaacttattgaatgctgtttaaataagatgccttgccaacagggttggagaaaaacagtagttttaagattggacaagctaggatccacgttgggccttagctttagtgaagcccttcatactgggaattgaacaggactgtcgtgga

SEQ ID NO: 303985 - DNA, 442 bp, Glycine max
  unsure (1)..(442): unsure at all n locations
agcttaacttcatcaattatcttcataattccnctcgctcaagcactcaagatgacttgctttagtgaggcatgtcaatgtttcttgggtttgattctgacttggcttgcttaagcacatagtatgcaacacttaagcgagaagagcttggtttcttcaataacttttcctgctaaaactccacaaaaacatcaaaaaagtcctaaaaaaacctaaaattctagagttccaatgtgattattcaaaattcaccccaatcttaaggtaaaacaaggctccatgtattagaaatgttccataatcacctacaatcatatgtaaaattaaagtatatttgacgattaccaactatcanagtatttgtcatttattaatagtactaattattacaaattatacttanaatgcatgatgttataaagacaaatctctacaaaaaata

SEQ ID NO: 303986 - DNA, 368 bp, Glycine max
tgtgcaaatcaaatcacccatacatttggtctctaacatgcattgtgtgtcggtcatcgagctttgacacgggaaaccggaaggtacatatcaccttgttaaatggacacatggagcactgcagacccgaatgctcaagttagaatagataaactttctgtctctcgagttcgcacaagggattcatatgctgctctacataagctatgcttcataccttcatagcggacgtatcctacctttgatcgctatcataatctacactcacattttgcttgaggaatagagttatcttgcaaatgcgtcttgcagagcatgtgatacgcctcattgcataccattcgcactcatgtgtgatcatacttgcg

SEQ ID NO: 303987 - DNA, 420 bp, Glycine max
  unsure (1)..(420): unsure at all n locations
tatctnttcacatagcttacggtaagatctgngacctagccttggtagaggtctccacagaggccattgcctccctcgcccaatattatgaccagccgttgaggtgcttcacctttggggacttccagttatcacccacggtggaagagtttgaagaaatcccaggatgccctctgggaggaaggaaaccatacctcttctagggattctatccctctttagctagaatttctaagatagtccaaaactcgacgcgggaattagaccacagaaagcaagtcaaaaatggtgtggttggagtaccaaggaaatgtttggaagcaaaagcaagagtcttggcaggtaaaggcaaatgggccctgttcatggacatcctcgcacttttgatcttcggaggggtcctcctttcaaatgtggatg

SEQ ID NO: 303988 - DNA, 395 bp, Glycine max
tctccgccaattgtctataaatagggggagaagtgaagtgaatttggttcattcccttaggcacttctctctctttcgaatatgcttggaaaaattgtttccgtgaagaaaatccaagctgaggcgctttcgaaatgtttccgtaatgtttccgtgaggaatttcgcgaaggtttcaaccgttcttcgacgttcttcatcgttcttcgatcttcaacgggtaagtacctcgaaccaagcttttcgattcattctatgtacccgtggcggtccacattgtgtttcgtgtatctctattctcgtttatttactttttatacccccttttgacgtgcttaagccattttatttaagtcatttcctcggcttacctaaatataagataaatttccatcg

SEQ ID NO: 303989 - DNA, 343 bp, Glycine max
tagctttgtatgtgatttttgcatatctttatatatttctcattgaggatttgaataagaaactgtttagaggtgtagcaactcaagtttttgaagaagttggtttttgatgaggtattacaatctttgtggtaaagtggtatagggtttttcatctttaccaccactgttctttcgtctaattgaaaattgcatttcaacacaaggaccataggggcgtgagttgctatgcattttccacagttaaaccccacagagctactacatgagcatgtagcgtgtcttcacctaacaggattatggaattgttgggttgatcatatgagctattgcattatacatg

SEQ ID NO: 303990 - DNA, 434 bp, Glycine max
  unsure (1)..(434): unsure at all n locations
tccactctgcttcactgcatcagctcgaatatttataatgttgataacaccttaccattcgccttgatacaaggaaaccacatcatgctattgtgctacatctcaaatgatgtgaagcactatgttcccacccattggaggcacccttaatggacgcccacatcaagaggtatgccaagcctgaagtatattagcaaggaaatacaggaatgattggctgctggccaaaaagacacacatgacacaccttctctcggacatccaattttggccaacctataaccatattattatctactaacatattcatacttttgaaaantaagcgaccaaacctgcgatgcgtaagacagctgcatcggctgatctttgcagccattacacatagtactttcgttgccctactgctcggctgaatggtgtatctcctcccc

SEQ ID NO: 303991 - DNA, 385 bp, Glycine max
  unsure (1)..(385): unsure at all n locations
agcttgctctagacccttgaggtaatatgcatcaagctagtgacattaaagaagcacttactgggaggcaacccaactctctttttccttattttattaatcattgcatatagtcaggtttcaacttgtttgtgattgttagagtaggtcatcaacctgttttttatgatcaaggggttgttaaagcttctctaaagttgtggatgaggaataacttagaaaatttttcagtcatccactcactcagcgcgccctgtgtgctaagcgaatcatccttcatgcactgagcgagtcatcactcgcgctaagcgcaccaaccccaaaccattggctgaaggggcctcactaagcgagaccaccgccctgagcccanaacctctatgga

SEQ ID NO: 303992 - DNA, 220 bp, Glycine max
tccatcataatggggtgtgtctcaacctacccttcagagggatttcgacgcagcgcttacagctgtgctttccaagtgaagaaggcgcgcgaagttgccaccaactattattcgacgaaaatgtgcactaaactggaacgtgcggtatatgaactttaataatgtaacgatcggtacaacgcgttcatccacggcgaagatattatcaccccacacatct

SEQ ID NO: 303993 - DNA, 412 bp, Glycine max
  unsure (1)..(412): unsure at all n locations
agctntgctctaactgcaacagcagagccactagaagatcctccaggaacccggtctggtgcacaaggatttctaggtgtgccataatgtatattctctccatttatactggcagattggaatacttagttacgtgagtaacagaaataaggtgttcaaaacatacacatgtctgattacacataaataccaacactcatagtcacattttccatacggagaagaaagctccaccaaagtgagctaaactgagcaagtatccatttaattattaaagtgcatcgtggtcttaccacagctaaatttaagggtggaaacacccttatgcaaatactttagagacaaaaataatcattgaggagccttggactttctatataggctactgactgactgatagatatattacttc

SEQ ID NO: 303994 - DNA, 494 bp, Glycine max
  unsure (1)..(494): unsure at all n locations
aaagtgcatatgnctccgactcaatgcatggtctcgatagatcttatgcgattgcacataccagccagggcgtcgaaataatatagtcatctgtgatatgcataaattacttgtcacacagcatttgcactcgtagaagggctcaatatgagagtgatactctgtttcacactaacaatctctagttctatgcaatgtatacctcatttattaggcacagttatctgagagaaaaaatcgtcccaccacgtcttcgcagaactggtaggtccagaacatagtgagcgtgcataacagtcactgaataataatacacatgaatatctccgtatgtgaatagcttattcttaccaacatgatgtgttctcatctaagccaggaaccattatctctgaacgtgaaattgcaaatcttttgacacatctctttacttcatgtatataatgaaaatttcagcttctccattctctactttgatccagagtctatgtgcg

SEQ ID NO: 303995 - DNA, 434 bp, Glycine max
  unsure (1)..(434): unsure at all n locations
agctntgagtctattcaatctacaataccttttgactcggatgtcggattgagtcacgtaatatctcgagacactcggaattgaataccgaagttatgagcaaattcaatcgacaataaatttttactcggatgtcggattgagtcacgtaatatatcgagacgctcgaaattgaataccgaagctctgagcaaattcaaacgacaataactttttactcggatgtccgattgagtcccgtaatatatcgagacgctcgatattgaataccgaagctctgagcaaatcgaaacgacaataaatttttacacggatgtcggattgagtcacgtaatatgtcgagacgctcgagatagaatacctgaactctgagcaaattcagacgacaatacctattgactcggatgtcggattgagtcacgtaatatcttcga

SEQ ID NO: 303996 - DNA, 409 bp, Glycine max
  unsure (1)..(409): unsure at all n locations
tcaacattcactgtctagcgtctggatatattacgggactaaatcanacaaccttgtaaaaagttattgtcgttcgaatttgccctgagctacatcattcaattacgagcgtctcgatatattacgggactcaatcacacatccgagtaaaaccttattgtcgatcgaatatgctcagagattcaacattcaattctcagtgactcgatatgttgcatgactcaatcatacatacgagtaaaaagttattgttgaacgaatttgctgagagcttcaacattcaattccgagcatgtcgatatataatgggactcaatcagacatccgagtaaaaagtatttgtcggtcgagttcgctcacagatacacattcaatttcaagcgctcgatctatgatgcgattcatcata

SEQ ID NO: 303997 - DNA, 181 bp, Glycine max
  unsure (1)..(181): unsure at all n locations
cgctttgcgagcgtgttatcttgngaactctctacatgataatagtgtaccttaagcacagcttgaacctattttaaattctagtctgttaataactatattaaaggggtctctattgttaaaatgctccgctacttctccgtcgtgactaacggtgggacataactgtctcgcctggacg

SEQ ID NO: 303998 - DNA, 445 bp, Glycine max
  unsure (1)..(445): unsure at all n locations
agcttcaatatatattccaaactcccttccaaaatctgatttcaggcttaaataggtggctttgttcgagcttgcgcgcttagcgtaactctgaaccgcttagcgcgcattagtgaatttcggcttagcgcgtgcttttctcgctcagcagatggactgaagcggagtgcttaccgggatgacccttcgctcaacgatcatgcacagttcatcctttttccagattcttcctcgtgctcagtcgaggagtgttgcgctcagcggatggctcgctatgccaatcttctggcttagcgagagggtgaaaattagcacttcacaaacttgcctaattaacctganattgagagaaaataattattaaacacactaaatgaaagtactaagtatttactacctatctttaacaaanattaattgcaacactacagaataaccataaatt

SEQ ID NO: 303999 - DNA, 383 bp, Glycine max
  unsure (1)..(383): unsure at all n locations
tatgaaagatatcagtctaatgctcataatcagaatattcagaatcaccagcaacagaatgctcacaatgctcagaatactcagaatgctcaaaatgatcaggatgcacactatgcctaactaatctatgaaaggttatatctatttcatgatcaaagggttgtaactcacctggattgcccctagtcattcactatatgcagcaaatcatgtatttttcatactagcaccacgggtaaaaagggggttaagctacgggtaaaactacaactatactcaaacgatatctagacgatctganaattcgtgagcaacacccaaaaatcatgaaaagatagcacaaaaattctcagacaataattcaaagtctaactatgaaaact

SEQ ID NO: 304000 - DNA, 323 bp, Glycine max
  unsure (1)..(323): unsure at all n locations
ggcttatacctttgaggtaatacgcaatcgggtagagtacattgtgtaaacgcttactgtgagagctaccaactcttatttttgctcattggattaatcattgcatatgcacttgtgatcctatgtctgtgatagtatcacaatggcgttaaccagtggtttatgagcgaagaagtgagtgagcttctattgatattaagaggccgcatatctttattaattctcttgtcatacacacacttactctcttatgnacacattatactacactctgcatgcactagacgagttataagtctctatgctctcatcatctctcttct

SEQ ID NO: 304001 - DNA, 261 bp, Glycine max
agcttatcttttctttaaagaaaactttaattagatacattttccgaatagctcttaaaaaattgaacaaattgttaattttttaacagaatattgaaagggaaaaaatttaagttagtaactgaacttttagggaaaattattagatgactcagaaattacacatctattgataaaacatgattcaaaacatcgatataccattggttgtgattaaaaaggaattacattacatttgtctatacatatcaactattctat

SEQ ID NO: 304002 - DNA, 185 bp, Glycine max
tgagagcgcataggcttctagacaagggatgtctcttattctatgcgagcgttatccagctgggctgcaataatatatcttcttgatatgataattaattttacgcgcataccagcgtgtatgccaatctatattaatctcttttacctacctttcattcacactaataaccccaaacacatact

SEQ ID NO: 304003 - DNA, 421 bp, Glycine max
  unsure (1)..(421): unsure at all n locations
agcttgtcatatggaaggataggataccctatgctttntggaagggcaacccaacagtgtctattattaggagagaactcggcaagtgcaacaccacagaaaaacatgattggaatgcaagaatatatgacatagtaaatatataatctaaaaatttacttttgttttaggttaatgcattaattatctcaagattaaattaacacattttttctctctctcttttcagcaatggttgcgagagagagcaagtaattttgagaactcaaaacttgaaaatcaatgtacctttaggtaaagttntgaagcatattttatgattctgatttttttaaataattattatagaaggggttagtttactcttttgaatctgtcacatataatcttttttagattgtacttactacattttgaaact

SEQ ID NO: 304004 - DNA, 301 bp, Glycine max
  unsure (1)..(301): unsure at all n locations
tatgcctgttatgatnttttggtttcggcgggtttctaattattaatatttttcaatttggtacttatagcttctgccgatggaagagctactggagagacgtcttactgaccctcgtttaccaatgtaagttttattgcgaagaaaaacttggttgaggcaatattgttcaatatgactatataaaggccacacatgatagtaaattatgttttttgatctattgggatttgggtcataccacagggaaacccatatccttcccattaatccatccttgcttcagatttgaacctggaat

SEQ ID NO: 304005 - DNA, 293 bp, Glycine max
agcttgctattatgttaagggactacaacaagaaaaataatgttagaaacttagaaaactagatagaataagataatatagtttaagagagcaaaaaaactcaccagaactataatgaagataatgagcgtcagaaatggtacggttaataacgatgtttgttgtcatggcggctatgacaaaattgagggcaagagatattatcttgagttaagaaaatggtttgctgcgttgaaactatgatggtgggtgcacatagaaatatatgatgagagaatgcttatattatttca

SEQ ID NO: 304006 - DNA, 601 bp, Glycine max
  unsure (1)..(601): unsure at all n locations
cctctctcccnctcctctctactccgtagtgatattatctgactgccactctcactgttgtgcctctcatacntcannnnncctccacacgcgcnnatttgttgcattcatagcacgtgcgcgacactanaatcactctagcatgtgcgcacgtcgatgctcgagggtgacgaggtcgagtgtcctttgtgaggacatagagagtgcaaatcgcaatcacgaggcgacgactatagaagcgaaggactatgaatactgtgtggtgacgaagattgataacattgagagttgtattcctttcatacattatgacatataacgagaagtgcgactgacgagcgaccgattcaacttatgcgacatgacgaatggcgcgtggcaccaggagactaactactcacataatagactatgccgagtgaatctccacgtataaagacgacatactacattctgcactgatgacacacatattaacactcccggacacctgcctacttctcatgaaactaaattcaacgctcatgtgtcatacctcgacgcctatgttagcctgccgacaataccctcattgattcgatccctccactccctctacacg

SEQ ID NO: 304007 - DNA, 366 bp, Glycine max
  unsure (1)..(366): unsure at all n locations
ttacttgaatgtgtgtaacccaccatatgtccataaaaggagatgtgctacgggcgaaattgaggccccttcaaagtgttntgcaagggtataccaccaactgcttgcccttcagtggcatatccgatgcaaggctcgaagtcggctagactgtggtggggaatttcatgtgtctcccccatgggttgagagacatgtacatgatgagggtgtcggctctcaatgagtatgggagcagagttattgacatcctcattgggagtgtacgccacattgggtggtgtatagttgggaggcaagccatatggcgggaaagtgtgctccgtttgaaattgcacaatatggagtcggacgtactgtctaaat

SEQ ID NO: 304008 - DNA, 436 bp, Glycine max
  unsure (1)..(436): unsure at all n locations
cttntgtttcctgaatggacggngtcagccaccacaaccatcattattatagtcatgatgagaagagcgcatcactgtatctactgatctcagaaaggactcatcctacttagctcgcactgttaaccacttgttctgcattaattcaaaattgattctgcagacatagccttgcttcaagattaactcaagatcaagcctggccttaaaacaaagtgctttcaagacatgcaaggctctggtaatcgattaccaagcagtgtaatcgattaccagaagacagggttgagatatagctcgtgaaaagggttttgaatttgaattctcaacatgtaatcgattaccatatgtttgtaatcgattaccagtggagagttttcaaaatagtcatgacacttcatattataactgggtaatcgattacacacacattgta

SEQ ID NO: 304009 - DNA, 333 bp, Glycine max
tatctttattctaacagaataatccgataatgtcatatatttcggtgttgattaagcataacaagactttgtgtgattggtttaaagatacaatctttgcagatgagaatgcttcaaaaacattatgaaagctagcagatgggcctaaaagaaatgttataacctggcgaggatacgacatacacaggtattcattttacacgaaagcacaagatgacggaagtacaatgcagaacagcggggtcaccctatgggctgaatctcaacactttgcaagtgtcaatgacgccaatccctgtgtagcttacatcccttactttgagttcattgatg

SEQ ID NO: 304010 - DNA, 316 bp, Glycine max
actagaaagactctgatagaagatgcttaaaggggatttgaaacacttcaagcatcataaaatcaataaatacagagaaataagtatttaaaataagaagcatacagctgagcctaagtccttggacaatgcttccatccttgaaaacaactcttgatctagtatcttgagtacttaagtcaaggtacacagacttgataaataagtttagtataggcacacatccaaaagtcgaattcatatgttatctagaatcctggatattttcaccatttactagataatgaaatgctagcatgatatacaatatcactat

SEQ ID NO: 304011 - DNA, 430 bp, Glycine max
  unsure (1)..(430): unsure at all n locations
agcttatagattatataataagagaacaatgacaattaaagaatcgattcatgtttcctttgatgagtctaatgttatttctccaagaaaggatattttagatgatatttcagaatctttagaacaaatgcatattcatggagaagattataaaggaaaaggagaatgaagcaatgaagatactccagtagaagtcaaagcaaataatgatcttccaagagagtggaaagcttcaagagatcattcccttgacaacattattggtgatatctcaaaaggggtaacaactagacactctctcanagatttatgtaataacatggcttttgtatctatgattgaacctanaaatttanatgaagccataatagatgaaaattggataatagctatgcaggaagactanaccaatttgaaagaaataatgttt

SEQ ID NO: 304012 - DNA, 448 bp, Glycine max
  unsure (1)..(448): unsure at all n locations
taagctgagaatgtttgtganatacatgcagtanaatacaatttatgtgcatcataattctaacctgctccactcacaacaggtttagcatcaatgataatatttttaagctcaatactaagaaaactctgnaagaagaaacttaaaggggatttgaaacacttcaagcatcataaaatcaataaatacagaaaaataagtttttaaaataagaagcataaagctgagcctaagtccttggacaatgcttccatccttgaaaacaactcttgatctagtatcttgagtacttaagtcaaggtacacagacttgataaataagtttagtatatgcacacatccanaagtcgaattcatatgttatctanaaatcctggatatntttcaccaattcactagatagatgtaaatgcatagcatgatagtaagtatatcactatttccatgt

SEQ ID NO: 304013 - DNA, 439 bp, Glycine max
  unsure (1)..(439): unsure at all n locations
agcttggggctagagctatcaaatgtccctttataggatatccacctggaatcaaggggtacaagttgtggaggatagaaccgagttaaccaaagtgcatcaccatcaaagatgtaatctttgatgaaactagaatggctatcaaggctaaggatcaacaatagactatcagtcaaggcaacaacttagaaattactaacgttgaggtggagctaccagcatggggtgttcaagtcaaggaaacaaataatgatcaacaacttgaacctatagttaatgattacaacttggctagagataaagttagaagatacatagtgcctcctgagaggtgtaacagccgcgccttttttttntttttttaggttttcctattaattaattaattatcaaataaataaataaataaaatcaggtacgtcataagtttcccactata

SEQ ID NO: 304014 - DNA, 454 bp, Glycine max
  unsure (1)..(454): unsure at all n locations
cttctccccaattntctataaatagggggagaagtgaagtgaatattggttcagccccttaggcacttctctctctttcgaatttgcttggaaaaattgtttccgtgaagaaaatctaagtcgaggcgcttccgaaacgtttccgtaacgtttccgtaaggaatttcgcgaaggtttcgaccgttctttgacgttcttcattcgttcttcatcgttcttcgatcttcaacgggtaagtacctcgaaccaagcttttcgattcattctatgtacccgtggtggtccacattgtgtttcgtgtatttttattctcgctttatttactttctatacccncttttgacgtgcttaagccattttatttaagtcatttctcgcttaaactataaataaaataaatttccatcgatcgtttgaattgtattattccgtaacttctggtaaaatgaattcc

SEQ ID NO: 304015 - DNA, 442 bp, Glycine max
agcttatccatagtggcattccttatatcaccaaaatctcaactcaatcacctttagagtcctactgaatcaataaaaagtaacttgtagcaatttggtgagtaattcaacactatatataataactacatctgcctgtgaaatttttagaaacatatacatatcttacatgaacttaatcttaattctaggatgtgtcgagtactatgtactcatttatgaaagatgaaaaattcactcatgttaatttggaagggattatagaatgcaagattgtttacaatcacgggaggaagactgcaaagattggttctggatggaagtcttttgcaaattcacaaaatttagaacttgcccaggaaattatatgtgagttcccagaatccaaatctaactgtggtctattctagattagtttggaatttaagtgcattatactcta

SEQ ID NO: 304016 - DNA, 417 bp, Glycine max
  unsure (1)..(417): unsure at all n locations
tctcaagcaagcttccatcaagtgatatcagagcacaagagcttctttatgtgctccttacacctccattaatctccattgttgcttcttcatttttctccatgtattttctcacatgtcttgtgttgaatgttgttaacgtgattctttagaatttccaccaattaaacttgctatagaagctagatttgatttcctatggttaaaatttcttgttcttgttctaaatccatgaattgtgttgagtttaggttcctttgagttntgtcttgctattcttttgtggctgaaactcaaaccataaaattcttacaaaaacattaaagtagaagataaactcanaaatctagagtgacatgttcacctattgtagttttgtcatagaagtcatgatacttgtcacataagattccttat

SEQ ID NO: 304017 - DNA, 380 bp, Glycine max
  unsure (1)..(380): unsure at all n locations
tatagtctcacgaatgccatatcttgatgcaataattgttattctttgccataccagacattattgctaacagagtcggacatgccataactcaatcgtgctntttcttcaatgtcatatgtagcaaagtccttgatcctgccaagttagatgagctacaaaatgaggctaccaatacattgtgtcagatggagatgtattttcctcctgtgttcttccgcattgtggttcacttaattgttcatctggtgagggaaattaaatgttatggtctctgttatttgtggtggatgtacccgattgaacaatactagaagatcttaaaatggtatacaaagaatctacaccgttttgaagcatctattgtgggaaggtacatt

SEQ ID NO: 304018 - DNA, 375 bp, Glycine max
agctttatatcctttgcagtaccaaacacataaaccatagtgtgctgaactcggtgcatacatgaaccttgatagaaaactagtagataacatcaaatctagtctagatgcattcaactaaagagagtacacaaccagactattatactgaggaacatcagccttttcatcgccatcattcttggagagtatttcatttacaacaagaggagttgtagcgagatgacaactctgatacctgaattgtttttaacaaagcataggcataatttctgtgagagaaagataccatcatcaagctgatccacttccattcccaatatatacaccatcacgtccagaattatcatttcgaacacttgcagcatgctcttc

SEQ ID NO: 304019 - DNA, 401 bp, Glycine max
  unsure (1)..(401): unsure at all n locations
tgagatatcacaggangccgctacagatgctactattgctgcgtgattacacacttgagcccgcttaaaggtaagggatgagtttatcgcaattgctgttaaaataaacatgtgtgtatgcatcttcagaggattacatcggggtttctttttgtatgcctactgaactatatttttcctttacgatcataaatacaatattgttgtgtttgacggaccaattgatgtcctgatgtgaattggttgataaacctgagagctcttagtgttgtcatgtttctgacctactgatttgatgcattgattctaatatgattgtgtggaattatttgacgtgtctactctccatgctgtgtgaaacattttgtataaatatttatatcgagattatgaaatgatga

SEQ ID NO: 304020 - DNA, 177 bp, Glycine max
cgtccggcccgacaacctgtattatggtagacacctatcatcgaattcatgcattacgcgcttatacactcctaattcgcgagatgcgagagccgtcgaaggaacttatactgcgtagaaaattaggaccggctgcttccaccgagacttatgtcttcctagcctcctgctcccccc

SEQ ID NO: 304021 - DNA, 377 bp, Glycine max
ataagatggccgaaggactacaccgtctagactgggaaaaccctgacgttacccatcttaatcaccttgcaggacatccccctttggccagctggcgtaataccgaagaggcccgcaccgatcgcccttcccaacagttgcgcagcctgaatggcaaatggcgcctgatgcggaatattctccttacgcatctgtgcggaattcacaccgcatatgtggcactctacagacaatctgctctgatgccggatagttaagccagccccgacacctgcaacacccggtgacgcgacacactttcgttcctaccaaataaaagctcgataagtactccctccgtaaaatacatcgttcgtattcgatctcccagtcaaccg

SEQ ID NO: 304022 - DNA, 121 bp, Glycine max
agctttctattggatgatagtagtctaataagtttatgccatagtacgtcgtactacgcttggattttaaagaatgaccactctgctagctgattaaagcacacaggtgcacagtaatttg

SEQ ID NO: 304023 - DNA, 257 bp, Glycine max
  unsure (1)..(257): unsure at all n locations
agctttacatcagattttagtaatgacccactaacctagaattaaaataacttaatgccattaacctanggaattaaaaaaacttaatggctgagtgtaactgaaattgtggcaaccaaaagtcacccccaacagccaacaagtcagtcaccatttggtcttccaaaaggctgatgcctaggttggcaattgggcccttattacaacttgaactacacctaactaaagcccttttagttgattaacccaaaacatat

SEQ ID NO: 304024 - DNA, 162 bp, Glycine max
  unsure (1)..(162): unsure at all n locations
ntaactcggatgnncgattcaggcgcataatatatcgatacatttgatattgaataacagaagctctcgagagattcgaatggtcttaactgttcacaccgatgtccgattcgggcgcagagtatagaagagacgctcgaaattgatcaacggaagctctcg

SEQ ID NO: 304025 - DNA, 440 bp, Glycine max
  unsure (1)..(440): unsure at all n locations
agcttgagcttggttcaaccccgtaatccaaggaatggaaattctgatcgccaatacttcaacaacatctcatagggatgaatgactcgggcatactttaagcttatgcacggaaaatgtaattatgaaattgagatgcccgaagaaacaccatttcctagttaaccatgcattangtaccatgttcaattattttgtttttaagtgaaacgggtttatgatcccaacatggttggctcctaacacatgaaactaagaatgtagtgtgaagtttcacgcttcccccttctttgtttttgttttgtagaggaaaacgcaaggatgagcaaacatganaacaaatggtatgcaattntgcagatcanaaagtttggtgaacgcatatgcatgatgatgccatgactcatgcanaatggtgaggctggaatatgataacggac

SEQ ID NO: 304026 - DNA, 280 bp, Glycine max
  unsure (1)..(280): unsure at all n locations
taagacatctctctatggacttaaacatgcaccgatgcaatggtatggtttacttanaaacttccttcttgaacaaaaatttgagagaggaaaagttgataaaacacatttcattaaaaagatctctcataacattttactcatgtaagtttatatggatgacatcatttttggttctactaatcgatctctttgtgaagattttgtacacaagatgcacgaggagtttgaaatgccaataatggggggggggattatattactttcttggtctctatgt

SEQ ID NO: 304027 - DNA, 419 bp, Glycine max
  unsure (1)..(419): unsure at all n locations
tatctcttcgattcattctatgtacccgaggcggtccacattatgttttgtgtatttctattctcgcttcatttactttttataccccctcttgacgtgcttaagccattttatttaagtcatttctcgcttaacctaacaataaaataaatttccaccgaacgttggaattgtattatccgttaacttcgtttaaaatgaattccgaccgttcggtcgtgccgtaaccacgttggaaatcacaaggagataaaataatagtataataacacaaatataccttttagtaaaataaagcggaaaaatcaatcggacattttctctttgggatatctcattgttaattgaatagactaataactaacgtgaaactaaagctanaatcaactcgcctactcaagctcgtccacgaaaatacg

SEQ ID NO: 304028 - DNA, 365 bp, Glycine max
  unsure (1)..(365): unsure at all n locations
nttaatttcaatgcaaggaagcatgacttatgcctatgaatctatatatttggttttgaatgtaaaagggcatgaatattaagacatgtgtgagaggttcttattagaatctacatttggctgccccatgaggaataccttacacctaggtagcatggaaaataccttccaacagtatgtatagatgtgaatatangtagcgcgaaaatacctttcaacggtatgtaaagatgtgaatatatggcataaaaataccttgcaaagtgtgaatgaatagcaaaaaatgcctttcacaatatgtatatttgtggataggtagcataaggatcctttcaaaaaaatgtacccatgtcaaaaatggcatg

SEQ ID NO: 304029 - DNA, 446 bp, Glycine max
agcttgaaggcaaactggatgcattggttaacttggtaacccagctggccttgaatcagaaatctgtacctgtcgcaagggtttgtggtttgtgctcctctgctgaccaccatacagacctttgcccttccatgcagaaacctggagcaattgagcagcctgaagcttatgctgcaaatatttacaatagacctcctcaacctcagtagcaaaatcaaccacagcagagcaattatgacctctccagcaacagatacaaccctggatggaggaatcacgctaatctcagatggtccagccctcagcaacaacaacagcagcctgcttcttccttccaaaatgctactggcccaagcagaccatacattcctccactaatccaacaacagcaacaaccccagaaacagccaacagttgaggcccctccacaactttccctcgaagaa

SEQ ID NO: 304030 - DNA, 414 bp, Glycine max
  unsure (1)..(414): unsure at all n locations
ctntggagtagaaacctgggaccaactcattntatttcaaaatggaagtcatatctagtcaaggtctgagagaccatacaagtttcctaacgatttctaattatgtgggccattaagtctatcatatgctgacaatagccgagaagcccatgaatctcttcgggggcggagtaggtgtctgccatcgccttggccttggctaacaatcggggaagttcttgactcccgttcaaggtaagagcaaaccgatccatccacatggttgcctcttggtgtaaagagtcgatcacccttcctctagcctctttttccgcatatacttgggcatactcatccacgattctatgctcgtgggccgtggctagaccgcactcttcttcgtacttggcgatgatagctaacatgttggtctct

SEQ ID NO: 304031 - DNA, 303 bp, Glycine max
agcttgcttgtagagcttctatggaggctagatctttgagcttcaatgaggtcctttaatggtgattttccaccatggagatgcagcggaagacaaaggagaagaggtgagaggaggcgccatccactatggaataagccatggaagaaagagcttcaccaccaagatgagccttggataagaagcttggagagggtgcttcaatggaggaaaagaaagagggagagaaagagagaggtgggaacacgaaattgaacgaagaaaatgggagagaacgttgagtcgcgtctcataagactctca

SEQ ID NO: 304032 - DNA, 316 bp, Glycine max
tgtgctccaacatcaaatgtgcaataccaaagcactcactttctttgcttttgtaacaacaacaatatatgtagaagaattcttcatcaaagacttgtacatgtcaaccttgtagaatgtgagtccaacttccttgagacctaactggtaaaccattaacctttgaaaagaaagttcagctatacacacctctgaagccttaactctttaaccaagtctgattgatgtgctttggttgaatcatctctttcttggcataaatgtacttgtatgacgcctcacattgttccttagaaaataaacgatttgccttatg

SEQ ID NO: 304033 - DNA, 243 bp, Glycine max
agcttctgttttcaatgtcgagtttcacgatatactacgggacactatcggacatccgagtaaaaagttattgtcattttaattttctcggagcttcagttttcaattacgagcggctcgatttattacgggactgaatcagacatccgaggaaaacatttttgtcgttagaattcgctcagagcttttgttttcaatatcaagctgctcgttatattgcgagacttaatcatgcatctgagt

SEQ ID NO: 304034 - DNA, 338 bp, Glycine max
  unsure (1)..(338): unsure at all n locations
tgtagcanattcaaacaggaaataaattttactcggatgtctcattatgtcccgtaatatatcgagatgcttgaaattgaaaacggaagctcgtagcaaatgcaaaacacaataactttttactcggatgttcgattgtgtctcgtagtatatcgagacgctcgttattcaaaacagaacctcgtatcaaattcaaacgacaataactatttactcgaatgtttgattgtgtcccatagtatatcgacacgcttgcaattgaaaacagaagctcttagaaaattttaacgacaataactttttactctgatgtccgattgggacccgaatatatcgag

SEQ ID NO: 304035 - DNA, 249 bp, Glycine max
  unsure (1)..(249): unsure at all n locations
agcttanggatggaatacttacttgttggtgatgaacaaaagcgcgaaacggaatcaaaaaatgcgaaaaaggatgaccctagggctgcaaactcgtaaaccccgtgggtatggcttttgaaaggggggaaaagaagtttttgaatgcaaaaacgtcccccctttcgtcacttttatattttggtgcagaggtggctcgcccaggcgagctcagctcgcccaagcgagctaacctgcactttttttttt

SEQ ID NO: 304036 - DNA, 214 bp, Glycine max
tctatcacgtgtgtgtgtgtgtgtgtgtgtatcatgagggtgtgtcattctgtgatgagggtgtgtatcatcagcgtgtgtgtgtgtctatgatgagtgtctgtgcgtgttatgagggtgtgtgcgtgatgagtgtaagtgtgtgtatcatcagcatgtgtgtgtatgatgagtgtatgtgtgcgtatcatctagctgtgtgcgtgcctgtctg

SEQ ID NO: 304037 - DNA, 265 bp, Glycine max
  unsure (1)..(265): unsure at all n locations
agcttccttctatgattagagaaagtcaaagatattagtaagtgttctgattggaatatagtgttactttacctctcttaagagtgaacgattcttgcgtactataagagtgtacgagattatagagaaactcgaagcaggatgatcagagatacgacatcttcttactgaccatgctttaggnaccaagacaaatagagcagtcctatcatctcaacagtgctcgatatctatggagatcgtataagtcaagaagactattttg

SEQ ID NO: 304038 - DNA, 221 bp, Glycine max
tgagaattacatgacgagaacaagacttatgttgcggcttgtcatgatatgaggacaaaagacaagaggtggccttaatagggatcaagagagaaataacgaacagactatgtgacatcaaaatgtctcttttttctgtgctgactgctcacactgaggactcaagatgaatctggtacctcttatatggagagtgactgtgaccacattctcatcatgcc

SEQ ID NO: 304039 - DNA, 376 bp, Glycine max
agcttatggctccaaagtacatcttaaactaaattcacaagagacttattctaatgattgaaatcggactttagtgtcataacaacctatgctattaaaattaaaactaacacttcacaatgcttaaatatgcttaaaaataaatcatattgccagcccatagctggcacattgatattccacttggatcatacgtatcctggactcttctttctcacttttgagatgaactagtacgtgttgatcaatttttcaaacatctctttggctatcttagctcttaccttgttgttaagccccttatccaaactgggttcttcctctaccaagctctacatttttccctcgaacgctatgacaccctacattctattat

SEQ ID NO: 304040 - DNA, 367 bp, Glycine max
tgatgactaccctcttatgtgaacaatacgggtatttacgatcttgttacatgaatatggcacagccattagaaataacgctaggttagtagccaatggatacaatcatgaagaggggatagattatgaggaaacatatgctcctgttgctagattataagccataacagagatattagccgttgcatccataatggaatctaaactttatcaaacggatggaaagagggcctttgtgagacgcttatcccagaggacgtatatgtctatcaaccccctggctttgaaaactcagatatgcctaatcatgtctttatattgaaaagggctttatatggtatacaacaagcctctagggcttggtatg

SEQ ID NO: 304041 - DNA, 333 bp, Glycine max
agctttgatgatgcagtgagaggagttgatggtgtctttcatatggcgtcccctgtgcttattccttatgatgagaacgttcaggtatcttgccctttatcccccactgttagtatttttgtctttatctcaggggcttccttacaagaaaataaggagggtaaatagagaaaaaatggacactcaaaagtcaaaacttgttttcttttacttgatttgactctgtagctcatttacaaatgtactacctacgttaatgtttatattacggcatgataccattgaaacgtgactcgtataagtattaagtacttgaatcctgatgaatcaact

SEQ ID NO: 304042 - DNA, 291 bp, Glycine max
tattgtatgcatgcttgtggtttgatcacccattggtgtgtgctattaggaacttgatagagtaggactagatagctgtagtgctagacatagtgtgcagggttctagttttcattatcctgtgcttataatgttggttaaattaagctaagttcaacaagaaacatttgcggatgaagcttaatttaaattagtccaaacgcacgagacatcggtgttggtattttggcctcagcatagaacacatgaattatgtcaaatagaaacaaaccctaattgcatcaagtatct

SEQ ID NO: 304043 - DNA, 415 bp, Glycine max
  unsure (1)..(415): unsure at all n locations
agcttgcacattgctgcttgatagaagaagagcaagacggtaaatcatggtactttgacatcaagcggtacgtagagtataaggagtatccacagggggcttctgacaatgacaagaggacattgtgaaggttggcaactagtttctttttaagcggaggtatcctatacaaatgaaatcatgatatggttttgctctgatgtgtagacactaaagaagccgagcgaatgctcatggaggtacatgaagggtcctttgngatgcatgctaatgtgcatgtcatggctaggatgattctaagggcagactatcactggctcaccatggaaaatgactgttgcatccatgtgaggaaatgccacaagtgccaggcattcgcgaacaatgtgaatgctccgcctatgcctttgaacat

SEQ ID NO: 304044 - DNA, 383 bp, Glycine max
  unsure (1)..(383): unsure at all n locations
tcttagtttcacatgatgcagatgggttngtagctacctcatgcactcctctaatgactatggcatcatttctggcgctaaactgctgcgagttggaagccatcttctcaattaaattcctggcttcagtaggagtcatgtttccaagggctccaccactggcagcatctatcatacttctctccatattactgagtccttcataaaaatattggagaagaagctgttctgaaatctgatggtgggggcaactggcacatagtttcttaaatctctcccagtactcatacaggctctctccactgagttgtctaatacctgagatatccttcctgatggttgtggtcctggaaacaaggataaatctttctaagaatactctc

SEQ ID NO: 304045 - DNA, 440 bp, Glycine max
agcttctcctataacacagtatcatcagcatattgaagaacattcacaggaactttgttcttccccaccaaaaaacttctgaacctattctgggaaactgcttctctcatcaaccctgtcaatccctcagccactaaatcaaagaggagaggtgccaaggggtcaccttgtctcaatcctctttgaggattaaattctgaagttgggctgccattaacaagaacagaaatggaagccgaattaaggcaggcccttatccatctaatccatctctcatggaaccccattctcttcagcatataaatgagaaattgccaagatacagaatcatatgccttctcacagtccaccttaaaaaccatacaagacttctcggatcttctagcctgctcaatcacttcattagccaccagaactccatgaagcaattgtctaccctg

SEQ ID NO: 304046 - DNA, 435 bp, Glycine max
  unsure (1)..(435): unsure at all n locations
ntcataagtgaaatcaggtgcagccatctccctaagagtcctctcacgaggtggaggttgagccatgttctcagcaaaatcagaatattcagaatcgccctcaacagaatgctcaaaatgcacagaatgactaggatgcacactatgcctaactaatctatgaaaggttctatctatttcaggatcaaagggttgtaaatcacctggattgcccctagtcatgcactatatgcagcaaataatgtgtttctaaacaagcacctaacaaggggtaaaactataactatactcaaatgatatcaaaatgagctgaaattctgtgaggaaaaccctaaaatcatgaaaagagagcacacaaattttcaaataaaaattcagagtctaactatgaaaactacctaagagaagtttagaagaataggacaataatacttg

SEQ ID NO: 304047 - DNA, 434 bp, Glycine max
  unsure (1)..(434): unsure at all n locations
agcttgtatgattatggngtacccatcacatgtggtactaggtggcggtcgggcgatggtgcacaacaagttttccacatccacaaatcgcgcataaacccgccatcccctgttgcccacctccaactgagctcatgtactcccacgtagcccatatcctcatttctctcaacaccgggtccccatcaatcctctcaagcttccccaacatccaagtaaaacaacattcaaacagcacaaactatcacagccaagaaaacagagcaaaggcagaaaactctgccaaaacaccaaccaaaatcacagcttttctcacttanagaccccagtaacaattccttcgttccaatttgttaaccgttggatcgactccaaaattntactggaagtctctagtacataaccctacattntgaccgttgngatctactagc

SEQ ID NO: 304048 - DNA, 436 bp, Glycine max
tcaccaccaacagagtgtcttggataagaatcttacggaggaagcttcaatggaggaagagaatgagagagagagagagagagaaagtggcgtgggaatgaaggaaagatagggagagaagttgaactttgaagtttgtctcacgagactctctttcctcaaagttaccacaagtgttacacatgcttctatttatagcctatgtagcttccttgagaagctagcgttacacccctctaatagctaagctcacctccatgccaaaatacatgaaggaagagagctttcttgagaagcttccttgcggagcaagtgttacacctcttcaatagttaagctcacccccatgggaacacacacccctccaatagctaagctccccccgcccccagatacatgataatacaaaacaagttcctactacaaagactactca

SEQ ID NO: 304049 - DNA, 417 bp, Glycine max
  unsure (1)..(417): unsure at all n locations
agcttgataatggaagacacatgaacagctctaggcaataacattcatggggctccgaanaatggtgagaatggaggattgccttgagggtcctcacttangcaatcatgaaacacaactccaaactcgaaagtggaggacacatgaccagccctaagcaataacattcatgtggctccgaaaaagggtgagaatggaggattgccttgagggtcctcacttangcaatcatggaacacagctccaaactcgaaaatggaggacacgtgaacaaccctaagcaatagcattcatgtggctccgaanaagggtgagaatggaggattgccttgagggtcctcacttangcaatcatganacacaactccaaactcgaaaatggaggacacatgaacagccctaagcaataacattcat

SEQ ID NO: 304050 - DNA, 339 bp, Glycine max
tatccttatggcaactcccgccttatgacgactattccgggctagacgatgaggaaggagatacccatctcggccccctgcttcacctcaaagatctgtgcccacatgaactaccccaaccgaacatagtgcgccatataccgacctcacccacacccgtaaaagaatctgttcccttcgcggaagataagggaaagattgaagcgctcgaagagaggttaagagcagtcgagggccttggcaattacccattctcgtatttagcggatttatgtctcgtgcccaatatcgtcattcctcccaagttcaaagtaccagacattgataagtacaaaggga

SEQ ID NO: 304051 - DNA, 223 bp, Glycine max
  unsure (1)..(223): unsure at all n locations
agcttctacaggatcttccgcgtgatccaacggaagaaggttntgtaggatcttccgcgcgatctancggaatgatgatgtttttcgtggataccgatgatgatcctgtactatgctatcccttaggcactatattgctaatgtggcataacatgcggatgcctatactctatggttacgttgattgtagtgactcgctttgtccgtcatatacatattcatc

SEQ ID NO: 304052 - DNA, 339 bp, Glycine max
  unsure (1)..(339): unsure at all n locations
gtttacaaagcgtcgatgccaagtgtatactgtttttatttcatgntacaattgtacgcagcttgtgtctccttcatagagagggcatgcacgatggcctttaacactgcattcattcaaattcctatatgctagaaagtcattaatggtgcccaataacattgcacacaacttgaatgatcaatttggatagccatcaaacacaacaatgcactcatactacaactttgtcaagtacttaatcaagggaccgagataaacaccaatatcatatcctcggctgtcttgcggctgatagcatcattgacaacatcatgtatatttgttgcatgcgcaacc

SEQ ID NO: 304053 - DNA, 352 bp, Glycine max
agcttgctcgagcatgtatcaacttataccaatgtgtatgagttacggacaaagcttgaatctttgattcaaaagaagacgccaaggaataaagctcatcttgtgagacgcttggtcaaggtggagtacatgggtggttagaacatgattgaacatcttaaaaccttcaaatgtattgttaatcaattaaagaagatagatatgaatatagattatgaactacaaactcttctactcctcaattctctgcctgagagttaggacacattggttgtcactctcaacaactctaaactagatggaaagcttagcatggataatgtcacagatagtttgctaaatgaagagtcta

SEQ ID NO: 304054 - DNA, 456 bp, Glycine max
  unsure (1)..(456): unsure at all n locations
tgtttagtgcaggtgctgaatctcgcgcttaacacctgctacttacttagtgcgtgctgcgcatttagcgatggcaacgatgtgcgcactaaacacgtgttgatcgctgagcgcgctgctaggttgggctggatgatgtaatcttaattcttctttgtaattagctgtactaaatgctcttacttcctaaaatagatatatatgcaaccagtatttaaaaaaatatcaatacttaacaatgtacaccaaataactactatataattatttttagagataattntattgtattattctattatccacagcataattatttagtagatatcacatcgttggcttgagattattgcatttacattagttaccttgagataaaatatactcatgttaattacattgatttagagatcccaacaagtntgggaaaagcagaaaattatggatcctaatata

SEQ ID NO: 304055 - DNA, 189 bp, Glycine max
agcttaagaatttaaccaagccgaggtatcctatggtaacatcccactttttttaccatttcaatgatctaagaacactacccaatcacataacaaaacaataacatcgtctatcacacgcacatagaaaattgggatttacaacaaatgcacccatggatcaaatccatttgtttcccctacccccct

SEQ ID NO: 304056 - DNA, 455 bp, Glycine max
  unsure (1)..(455): unsure at all n locations
gtcactttntaggtactcgatgcagcaattgagttcattcactttaccttctctgntagatgcgtggtttctctttccagtgaacgttagccaagaagtagcccaaaaattccattagttatattggtgtgaaatgttttgtagactgtggatagaaattaaatgctttgaatatcatatgaatgtagcgctatgttctatgaaggccaccttttggatttcctcccacttcatctctacgtgcttggtggtgttgatattcaagaaactaagaaagttcttgaatttggggaatcaaataatattaaaaattaagagttgttgtagaaattaggactgatttattaaaacaaaattagtggcccttacaaaaatcatatttccatgtgcaacaatattcaatattgtagcctcttatctgtaggtacactgtaatggatatccaactaatatat

SEQ ID NO: 304057 - DNA, 449 bp, Glycine max
agcttgcatggattaatagcaacaaatacagagtaattgttgaagaggataaattgatcgtaataataaaacctcaaagagagttgtgcttgatcctcaagagaaaacaacgttggatacttagccttccattaatcagtagaaaacgaaattgcagattgaagcagaaaacgaaattttattgctaggtgaatagtaaaaactggaattgcaaaacctaaaattattctttctccccaaaacgaaaagagagctctaaaactaaaaccttggtgctgttatataggttctcagccccaaagcttacaaatctattttaagtccaagcccataaataaaataaaatctgggcaagataagataagatttgataaaatacaatctagatgaagtagaatctagataagataagataagataaaatctagatgacataatatctagatgag

SEQ ID NO: 304058 - DNA, 352 bp, Glycine max
agcccaccatgtttacatcgtagaacactggtgttgtgtctactatcattgtcatcattgatctctccgtcattgagagtgccacattctgctgccaagtatctccacctttgggcgtattcttacgaaagattcttgccccctttttgcacatgttctgtaggtgcatcctatccgaccatattatactgacactgcctaacgaaagccaccactaagtacttccaagaatggacttccgcaaagaaccaggtacagtaccaggatatagctgcccgaataagactttcttggaaggaatgtatcagcacttcctcatcttttgcgtaggcgcccatcttccgataataca

SEQ ID NO: 304059 - DNA, 438 bp, Glycine max
  unsure (1)..(438): unsure at all n locations
agcttgtagaatggttatacatgatatatgtcagggcttggtttggttcaaggataaaagggatgccccacattatttccatgacacaaatgcaaaaaatgatgatttggaaattttatgcaaaactggtcatgcatgcacctatgcagacgttcaagtgtcaaatttttatggtcatgtgatgctagggctcangattcatttcctctattttaaatcaacccaatgtttccaaaatatgttcttttatcaatttgtgcattcctccaagtccatttcgagcgtccggngaaattttcacagcattcacccttcaggtgtagacacgtcttttcttcanaaatcgattatgatcaatgaaattntntcanagaaaggttggaaatcatctcttttcacaagcatgtcggctnttagctagacaacttattttctctt

SEQ ID NO: 304060 - DNA, 418 bp, Glycine max
  unsure (1)..(418): unsure at all n locations
ntagtcaaacanaataatccanaaatgtcaatgaattgggtcttgatttagcataacaagactttctctgattggtttaaagatacaatctttgctgatgaaaatgcttcagaaacattaagaaagctagcagattggcctaaaaaaatgttataacttggcaaggatacgacataaacaactattccttttacacaaaagcacaagacgacaaaagtacaatgcaaaacagcagggtcaccgtaagggctaaatctcaacattntgcaagtatgcatgatgacaatccctgtgcagcttccatcccttactttgggttcattgatgaaatttgggagcttaactatgtcaaatttactgtatgtgttttcaaatgtaaatgggttgatagcaacaccggtgtgcagaccgatgatgt

SEQ ID NO: 304061 - DNA, 432 bp, Glycine max
  unsure (1)..(432): unsure at all n locations
agctntttggagtagaaacatgggaccaactcattntatttcaaaaaaaaaaagaaatcatatctagtcaaggtctgagagaccatacaagtttcctaacgatttctaattatgcgggccattaagtctatcatatgctgacaatagccgagaagcccatgaatctcttcgggggcggagtaggtgtctgccatcgccttggccttggctaacaatcggggaagttcttgactcccgttcaaggtaagagcaaaccgatccatccacatggttgcctcttggtgtaaagagtcgatcacccttcctctagcctctntttccgcatatacttgngcatactcatccgcgattctatgctcgtgggccgtggctagacccaactcttcttggacttggcgatgatagctaacatgttggtttctgtctcgcata

SEQ ID NO: 304062 - DNA, 330 bp, Glycine max
  unsure (1)..(330): unsure at all n locations
tgaatcggacatccgtgtganaagatatgaccatttgaattttgtgcgtctctatatgcgatgctcctgaatcggacatccgtgtgaaaagttatgaccatttgaatttctcaagagcttccgttgcacaatatcgagcctctcgtcatatgatgcgcccgaatcggacatctgtgcgagaagttatgaccattagaatttgacgagaactcacgatgagcaatatcaagcgttactatatgtgaggcgcctaaattggacattcgagttaaatgttatgaccattcgactgtctcaagagcttgcgctgatcaattttgagcgtgtcta

SEQ ID NO: 304063 - DNA, 329 bp, Glycine max
atcttatacttgatgatgatgatcccatgaggaatgtgctctctcggagactaaagctcaggatcattctaggactcgcaggaaggaagctcaatttgcgacacacggggtcaatgcgctatacactagtggctccaacgtgattgaacatctgtacagactaacaaggattggagactatggcttgaagaggatattgctatagcttaagcactgcgtactgttctactcctcaattctctgcctgagagtcacgacacattggttggcactctccacaactctaatctacatggaaagcttagcatggataatggcacagatagttt

SEQ ID NO: 304064 - DNA, 187 bp, Glycine max
  unsure (1)..(187): unsure at all n locations
tatactatgaaagtgaagtcgataactcttaatgttggagacttctttggaagttatcctgcccatggatagtaacgatcgagctttgggcaaatggtccccanattgggaaggaccgtttaaagtaattcagatctattctaatggtgcttatgaattagaggaattaacccctcacaaacgtact

SEQ ID NO: 304065 - DNA, 405 bp, Glycine max
  unsure (1)..(405): unsure at all n locations
agcttaccctcactattacccacaaccacccaccaaacctatcaatgttaagaaaatgacatcggcagaaatgcacttgagaagagaaaggggcctatgctttacttgtgatgacaagttttcccctagccatcgttgtcctaataagcaatattttgttccacagtgggaagaagaggatgaacctgcattacaaccagatccaccagacgaggttgagacagctggtgaccctagtttgcaagatcatcatttgtcttataatgctntanaaggctcatcaagtcttggaacaatgaagtttcaaggatcaatanatggattgcgagtgcagattctactagataatgggagttcagataatttccttcagcctagactatctcaatgcctgaagtacctata

SEQ ID NO: 304066 - DNA, 417 bp, Glycine max
  unsure (1)..(417): unsure at all n locations
tgtggattntagggattgagggcagttatggtttgtgtttatgtttgagtttgtgtttgaggcttgtgttttggaagaaaaactagaagacaaagttttgggtttaggtgtatgtttctcttcatagagtttggccaacgaaatttttctgaggagtcatgtangtgattgtgcaatgacatcccttctgatatcaggttttaatcctcccacaaagcaatccaatagagcttcttgtgtaattccttgtactcgattagctaaagccgcgaactgcacgtaatatgactgaactgaaccaattttagcgagtttaaacaactgagatctatgacattcatacggtgatgggccanattctgtctctaatgctcgcgtataagcaatccatgttctgaatgatatttcacgagtcat

SEQ ID NO: 304067 - DNA, 443 bp, Glycine max
  unsure (1)..(443): unsure at all n locations
agcttgtatgattatggggtacccatcacatgtggtactaggtggcggtcgggcgatggtgcacaacaagttttccacatccacaatgcgcgcataaacccaccatcccctgttgcccacctccaactgagctcacgtactcccacgtagcccatatcctcgtttctctcaacaccgggtccccatcaatcctcccaagcttccccaacatcaaagtaatacaacattcacacagcacaagctatcacagccaagcaaaacagggcaaaggcagaaaactctgctcataacaccaaccaaaatcacagcttttctcacttacagaccccagtaacaattccttcgatccaattcgntaaccgttggatcgaatcccaaaatttactggaagtctctagtgcataagcctacattntgaccgtngngatctactagcatacatc

SEQ ID NO: 304068 - DNA, 394 bp, Glycine max
  unsure (1)..(394): unsure at all n locations
ntacagcagattntagtaatgacccactaacctagaattaatataacttaatgccattaacctagggaattaaaaaaaacttaatggctgagtgtaactgaaattgtggcaaccaaaagtcacccccaacagccaacaagtcagccaccatttggtctcccaaaaggctgatgcctaggttgccaattgggcccttattacaacttgaactaaacctaactaaagcccttttagttgattaacccacaacatatttttggtcagccaactttacaaggattgggccattatttagacaaactaaatactctaaaattgagacaaagtggtggcatttagtcctcctccatttgggccatgatacaactcacaaccttggacttttctccttgaa

SEQ ID NO: 304069 - DNA, 379 bp, Glycine max
agctttcactctcgaagtctggttcaggcgcataatatatcgagacgctcgaaattgaacaacgaatgctctcaagaaattcaaatggtcaaaacttgtcacacggaggtctgattcaggcgcattatatatcgagacgcttgaaattgaacaacgaatgctctcgagaaattcaaatggtcataacttgtcacacggaggtccgattcatgcgcataatatatcgagacgctcgaaattgaacaacgaatgttgtcgagaaattcatatggtcataactagtcacacggatgtccgattcatgcgcataatatatctagacgctcgaaattgatacacgaatgctctcgagatattcaaatggtcataactttgtcca

SEQ ID NO: 304070 - DNA, 339 bp, Glycine max
  unsure (1)..(339): unsure at all n locations
tctcgatatattatgcacatgaatcagacttccgtttgataagttatgaccatttgaatttctcgagagcattcgttgttcaattntgagcgtctcgatatattatgcaccagaatcggacttccgtgtgactagttatgaccatttgaatttctcgagagcattcgttgttcaatttcgagcgtctggatatattatgcgcctgaatcagacctccgtgtgacaagttatgaccatttgaatctctcgagagctttcggtgttcaatttatagcgtctcgatatgtgatgcgcccgaaccgtacttccgttgacaagtgatgaccatttgaatttctc

SEQ ID NO: 304071 - DNA, 383 bp, Glycine max
  unsure (1)..(383): unsure at all n locations
agcttgaatgtgtgtaacccaccatttttccatagaagggttgtggttaggggcgaaattgaggcccctccaaagtgttttgcaagggtataccaccaactgcttgcccttcagtggcatatccgaggcaaggctcgaagtcggctagactgtggtggggaatttcatgtgtctcccccatgggttgagagacatgtacatgatgaggttgtcggctctcaatgagtatgggagcagagttattgacatcctcattgggagtgtacgccacattgngtggtgtatagttgggaggcaagccatatggcgggaaggtgtgctcgttttgaatntgcacatcatggggtcgtccgtacttcctaaatctttgcctaccatatctg

SEQ ID NO: 304072 - DNA, 450 bp, Glycine max
  unsure (1)..(450): unsure at all n locations
ntgatggtgtcgagaagacatcacatgtttgtcatcatcaaaaagggggagaatgtgaatgtatgtatacatgattttgatgatgccaaagaagaatcaaactaagttgcttcaaaggataagcatggctttaagattaatacaagattgattcaacaaacatagccttgcttcaagattaactcaagatcaagcctggccttaaaacaaagtgctttcaagacatgcaaggctctggtaatcgattaccaagcagtgtaatcgattaccagaagacagggttgagaaatagctgttgaaaagggttttgaatttgaattttcaacatgtaatcgattaccatatgtttgtaatcgattaccagtggagagttttcaaaaaagtcatgacacttcacattataactgtgtaatcgattacacaaacattgtaatcaattaccagtggaga

SEQ ID NO: 304073 - DNA, 358 bp, Glycine max
  unsure (1)..(358): unsure at all n locations
agcttatactctatggtggagacccaagaatggttnttttttcttcatcttttggttcttgacagttatcattgcttggtacatttggaaatgattatatttctctcttttcttcttacctaaaacacagtgaaaagaaagtgatacttttgtgattattagtgaaagtaaaatatggaaatagaaaattttcctcacagcaaatagacctttaattttttattttaagaaaagatgttggcaccttcaagtggaaattttctaatatataagactatttgccaagtaacatcagctacaaagaagacagacttttactttctggtagctctgaatttggttacttcttattcttctc

SEQ ID NO: 304074 - DNA, 346 bp, Glycine max
  unsure (1)..(346): unsure at all n locations
tgcctcanagaggtccaggaaggacaaggcggccgaaggaactagtttcgctccagagtacgacagtcaccgctttaggagcgttgtacaccagcagcgcttcgaggccatcaagggatggtcgtttctccgggagcgacgcgtccagctcatggacgatgagtatactgatttccaggaggaaatagggcgccggcggtgggcatcactggttactcccatggccaagttcgatccagaaatagtccttgagttttatgcccatggttggccaacagtggagggcgtgcgtgacatgagatcctgtgtaaggggtcagtggatcccgtttgatgccgacgctatc

SEQ ID NO: 304075 - DNA, 394 bp, Glycine max
atcttctaaactctatacaagaatgaagctctgataccacttgttagacaattggcctcagatatcttaagaaggggggttgaattaagatattgcaaactattttcccaattaaaattctatttcaatttcaatgcaagttacaaattcccttaaaaatgaactcttaaataatgattcacatcgaacaatctgaatataaatataaagcaataataaataaaagagtttaagggaagagaaagtgcaaactcggatttatattggttcggccacacccttgtgcctacgtccagtccccaagcaacccgcttgagaattccactatcttgtagaagcttttacaagttctgaacacacatagacagttcttcctttgagttcatacttcttt

SEQ ID NO: 304076 - DNA, 417 bp, Glycine max
  unsure (1)..(417): unsure at all n locations
gttgcaattggacattatttatctcaagcatacggacatctatcgctaaccttatttcactcaactgtaacaatgcttgatgatgataatgcccaagccttttgtgccagatttctgtgtgattctctatgagagagaaaacaacttgctcctccttcaatggatttagagcaaaactttttcctttcattnttaccttgaagatttcttgaccagctacatctttaattaagcaatatttgtcttccaatacaactttaaatcctcgttcaatcaattggccgacacttaataagatttggtcaattttcacaatgaataggacatcagcaatacatcttgtgcctgcagaacttgcgattgcaactgtcccctttcctttgactaggatatcatcaccattacaaattctgactt

SEQ ID NO: 304077 - DNA, 455 bp, Glycine max
agcttctagtcgtccatagacctcctctgtggttcggtctagcaaacgttgcatctgtgcattcatcgcatccactaacagacgttgagcgccgtccaactgatggtactcgtcaccaccaccacctgctccagccataattcaacaggaaaaaaaaaatgtgcaataaaaattattaaggtttcaggacctcacaacactctactcacgtctcttagatggtagtacactcgtgtttaatgctctcaataggcttttgtgtaatgtattccctcttgccttttaccactcgtgtttcctcttaagttcctggatggaccaaattagacacacaaggtaatataaaatagaaggaaagacaatataatgatcacaaacagatttgatttgcgataacaacttggacttgatttggataataatatattagatttggattcggataacaggtgagc

SEQ ID NO: 304078 - DNA, 435 bp, Glycine max
  unsure (1)..(435): unsure at all n locations
tccttaagaagattcctaaagaagctagagcttagctacactcacatctctaatagctaagctcacctccttgagatgagaagctagagcttagctacacaccccctataatagctaagctcacccccatgacaaanaaagatgaaaatacaaaaaaaaaaaagtccttactacaaagactactcaaaatgccccgaaatacaaggctaaaaccctatactactagaatggccaaaatacaaggcccaaacgaaggaaaaacctattctaatatttacaaagataagcgggctcatacttagcccttgggctcaaaatataccctaaggctcatgagaaccctagggccttcccttggatctctagcccaatctacttggagtcttctacccaatgcccttgcgggataggatggcatcaataactttcacatgg

SEQ ID NO: 304079 - DNA, 438 bp, Glycine max
  unsure (1)..(438): unsure at all n locations
agcttcagcgttgcctttgatcaagcgaagaatgggtggtgagcccattgtagagcaaaataatgatgaacaagctcttttagagtcagctctgactaaacttgttggagctgcaaaaatctacaacctaaggatagagaacttagtgtttcaacttcaatttttatcttcaaacttatctctagtgtctcttgttatcaatccttttgcgtcttatatgtctttaggagaaggcttaccagatgtaggctttattttggatgtatntaagttttttcctatacctatattaccaaggtgaaactccaaatctgactggagaacaataccaatagtacttatggtatgtgtctaagttttttcctatacctatatttctttgaaggagtggcactgattactttcttaattttgctttacaggtagaaacaactttgg

SEQ ID NO: 304080 - DNA, 442 bp, Glycine max
  unsure (1)..(442): unsure at all n locations
tgtagtgtacatgtctccttctaataaggaggatatgcctgtactttacaagtttcctagggctcttcattccaagacccttgtagacattcctttctctgagactctaagagtggattcgggtcatgagcatcctttattccaagacccttgtagacatgcctttctcactctgcttttctttcctttntcatgtaatatggctaagtacgattaccaatccatcaaaagaaaaaaaagttgtcaatgttgaagtggcagaagattgtgctcctcctcctcccatcaacactgagtccgacgagaggaaggatcttagtttttcttctcaagatgttacaaggaagaagcaaagagtggctactccatcatcgattatcgctcccttctccatcgagagccactcaatgttcctttctatgaaggagggtgagtattctca

SEQ ID NO: 304081 - DNA, 441 bp, Glycine max
agcttcatgctaagtgggtttttctgtgaattgacttaccagtcacgttataactgagctgatgatgaattcacaatcttctaaaagcctgattgatctgaaaaataatatcataacttttaaattttatgaaagtgcaaagctaattgggcgagtgtcaaagtttgatctcattaagaaatggatttctagaagacacgccacatcacatttgtatcgtattaaacaattaggtccgaaagaataatggttcaatttaaatactctcaagtgtccccgaacaatatcaaaacgttgatcctaatctatgttgaaaagacacccaaaaaagaacaaattacacatctacaaaagaagattatgttaaacacaagatatcacatatgatccaatctttcgccctttagttttgtataatttcgtttaagtgcgcacacatgc

SEQ ID NO: 304082 - DNA, 452 bp, Glycine max
  unsure (1)..(452): unsure at all n locations
tgtatttataaaatactagaatttctgtgtacattgaaagactttctaagttntgtgcaactaacaccaaataaaanaagattaccgctatttacactatcttttcttcttcttgaagttatactgctatatggagaccatggtccattgatgatctagagagtgtcttgtatgtgtgttatacatgtggatgaggatgttcctttactgtggttcacaaagtgacttctagcgccacttaaccaaagtgtgtgagtgtctctcctcaaataataccgaaacattgtgtatgatagcacacattatataaaaaaagttcttaaaaaaggtttgtcaccatgatttggatcacatcaagattctttaactgtctgtgtttgtaattggaactgcatcgatcacatttgtccatgaattgtcgggatatcaataaatgagatgatatcacaaca

SEQ ID NO: 304083 - DNA, 356 bp, Glycine max
tagctgatggcaatcagtaatactgagcatcttctaggacgtgttctcacatagccccgtaggcaattccaccatatctttgcattagtcaatactcatatcttctacaattggaagagcatctgatattagcacgttaacgttttcaaaagcctgtcttgtattacaaacgtgaacgtatgattttttaagattcttcttcatgactacgggaggatccgagatccgctctaatctcattcttcttacgctggatcatgagatcaccgactcaatattcttcatttcataacgatggaaaccactgacgtatgactatcacaacttttaggtcactcatttatttctacaacttt

SEQ ID NO: 304084 - DNA, 451 bp, Glycine max
  unsure (1)..(451): unsure at all n locations
ntntcgattcattctatgcgcccgtagtggtccacattgcgtttcttgcanttttattctcgntntgtttactttttatacccccctgttgacatgcttaagccattntacttaagtcatttctcgcttaacttagaaataaaataaatttccaccgaacgtttgaattgtattatccattaacttcggttaaaataaattccggccgttcggtcgtgccgtaaccacgttggaaatcaaaaagaggtaaaaataatataataatcaaaaagacatcttttagtaaaataaagcggaaaatcaatcggacgttttctctttgggatttctcattcttaatcgaattgggtaataactaaagtgaaactaaaggctaaaatcaattcgcctagtcaagctcgtccacaaaaataggctttttgaagtttgtcatctcaatttctcactaagt

SEQ ID NO: 304085 - DNA, 446 bp, Glycine max
agctctgcattccagggcgcacgattgatttgtatgctgaaatggtgccttggaagctcctgaggaaggatctcactacactatcccagacatggagtgtgtgatcatactccaacctcaccaccacttctcacatgtccgatctaaatatggacagggcgaggttagtctatgggctagtcataaagatggacatggacttgggctcgctcatatcaggccagatctgacagatggcccagaccaactcctcgcagctcggcttcccatctctcatcaccgccttatgcgtcgcccaaggagttatcttagactgcctcacattcgagtcctagagccctgccattaaattggcatacatacagaagaattgcttgaacatggatgatcccacaatcacttttccagggacccgtaaggcatgggctagagtatctgaggcctat

SEQ ID NO: 304086 - DNA, 294 bp, Glycine max
tggagcctcaatcacactatgtgcctgtgaggggcatttctctttccacatacattatttaacaaatcccaatggtgatgacgcgcataaatgatccccgagcccgatgttcaaaagtcaagatgtaccacgactagatgggcatcatataccaaatcatactattactaagacacgtttggatggatgcaggaaaaatatactgtctctcgagatgaagaacggaagccgaactcaataggaagagagaacataccgacgtatcatgagcgtaacaactgacctatcatatct

SEQ ID NO: 304087 - DNA, 227 bp, Glycine max
ctacttcatgcactcatctaacgacaatagcatcacttctggcactaaattgccgggagttggaagccatcttctcaattaaatttctggcttcagcaagggtcatgtgttcaagggctccaccactggtaacatctatcatacttctctccatgttgctgagtccttcataaaaatatcggacgagaagctgctcagatatctggtggtgagggaaactagcacat

SEQ ID NO: 304088 - DNA, 450 bp, Glycine max
  unsure (1)..(450): unsure at all n locations
tcaagacttagtcttcatgttgctacccctatctctaactatctcccactttntagctcggatgatgccaaacttgaattgccatttgagtgcatctggagagtcttaaaggtaaaggcttttcttagacaaacctgaaagtttcttaacactaagagaagcatcaattcatatcatcatcatcattaagtagagttatatatgaatgtatattctaatccaatgctaatgcaatttcttttttttttttctttatccccctacataatgctaatgcaatacactatgctaatgcaatgcactatgctaatgcaatttttctcccccttttggcacaacaaggccaaaaagttattactattcatagaatataaacaaacaagcatataatgcgaaaagggaaaatatcatggccttttattcatataagagccattacaacttagacat

SEQ ID NO: 304089 - DNA, 325 bp, Glycine max
atctgaggccaactataagtggtctttcggctagcacagtcggagcaccgttcaaccacttggagttatggaagatctactcgccaaagttaatggttccgttttccttgaacatttttacattttggatatggaagatgattcatctagatatggttctatattgatcctaaggagaccattcctcatgacagcccagaccaaaattgatgtgcatatacggacactttccatgtagtttggtgatgatgctgtgcagctcaacatctttgatgccatgaagcatccctcacaagaccactcactctttcttcttggatgttat

SEQ ID NO: 304090 - DNA, 451 bp, Glycine max
  unsure (1)..(451): unsure at all n locations
tctttgaganaacttccttgagaagctagagcttagctactcttacccctctcataactaagctcacctccttgagaagcttccttaagaagattcctaaagaagctagagcttagctacacatacctctctaatagctaagctcacctccttgagatgagaagctagagcttagctacacaccccctataatagccaagctcacccccatgacaaaaaacatgaaaatacaaaaaaaaagtccttactacaaagactactcaaaaggccccgaaatacaaaggctaaaaccctatactcctagaatgaccaaaatacaaggcccaaacgaaggaaaaacctattctaatatttacaaagataagcgagctcatacttagcccatgggctcgaaatctaccctaaggctcatgangaaccctagggccttccttggatctctagcccagtc

SEQ ID NO: 304091 - DNA, 431 bp, Glycine max
agcttattctgtgattgaatcaagaaaaagattttaaaataacaaaaatatggattaattttcttaactaataataaaaatatgcatttattatgtcatatatgtgagaagtagttatagaggtacctgaatatcaagaattgcttgccatggaaaaggaacaggagcatgtggattgtttaaaagaaagttgaacaatacaaaagtatccatgacaaagtaaaatgagaatagagagtcactgatacttgagatgactcactctatatatagtgagtcatgacatgaatttcaactatgcatttatctttcccatattaatgtaaatgaaagaaactacttttattgaactgtttcatgaaatttaaggaagtgtgtatcacataaaaaaatggctttaattgaggaacacaatttattgactttgaaaa

SEQ ID NO: 304092 - DNA, 446 bp, Glycine max
  unsure (1)..(446): unsure at all n locations
tcacaaagagaatacattntattaacatcgacattacactttttcagtacattgcaacaacttttgagaaagcctgccctagtttggtatgccaagtaggaaacaatacatctatgtcaaaattacatgtgacacctaattgcatgttttgtattgacaattatgaattatgataggaagatgaagttgaactacagggaaatttattaaacacgtacagtatgaacaaatggagaaattgcaatgtaaatatacaaattataaaggagaaagaagaaacaatggtgagagaaagaggaaaataaggtctatgagtttagagaaaccataatgaatgtactttnttctttttgcataacatggcatcagtatgaagtatccactatcggaagcaatgactaatctccgttatagatcataagtgacatgatatgggtattcttctc

SEQ ID NO: 304093 - DNA, 426 bp, Glycine max
  unsure (1)..(426): unsure at all n locations
agctntanaagattggctaagattttgttaaattataagcacttagacaatgaaggaaagctggagttgctgcacatgatgtccaacgttatgtcaaggaataagatcgggctgcacaatgcacaaggcaagataaaatgtctaatgaagaattgaagttgcaggatccacgatgtcggatacaatgtcctgacatcctgcccgaaaatactggagttgctgcacaatgcataagtcaagataaagtgtcaaatgaagcattgaagctgcaggatccacgatgtcggatacgatgtcctgacatcttgcccgaaaatactggacacataaatctgttatatctttaacagattattgtgcagttagcaagagattagatgatctatctttaggaacgaattaaaagatcattanagttcgaatttc

SEQ ID NO: 304094 - DNA, 446 bp, Glycine max
tggtttgaggtacttacccgttgaagactgaagaaaactattatcaaacgatgaatgttgaagaacggttgagaatcttcgcgtaattactcacgaaaacgttacggaagcgcctcggtttggattttcttcacggaaataattttcatcagcaatttcgagagaataagaagtgccaaaaaggttgaacccttttcttcttcactcctccccctatttatagcaaaataggggaggagcttgccacccagctcgcccaggcgagctcagctcacccaggcgagcaaggttgcttcctccagaagcaacaaccttctggaggaagaatctggaaggcccaagtgggccagattgctatttgtacccccactttttactaaacgcacccacttctactttcttggtaattctttcttcgtaacgttacgaaacttcacgaatttcgt

SEQ ID NO: 304095 - DNA, 429 bp, Glycine max
agctttgacggctattcctccttgtttttcttttgcctcttctgatattccaggcgtgagaagggctcactgacctcgttgagcgagtaagtgaagctctcgctcagtgccaaacttgcgctaagcctgcaaggtgacagatgactctctgagcgagctgatgacgctctttgcgcatgtctgcgtgacgaatacccttccacattcctcctatctgctaagcaccgtgatgcctcacttagcggatgacactcgctaagcacattgagctcgtttagcgagacatcaactctattatcttttcacacaaactcctttttgctcgaaaccgaagagaaattgacattaattgcatacacccggcttctactgagcacagattataacatagcacaatttatttacaatcctacaaaaagaaccataaac

SEQ ID NO: 304096 - DNA, 405 bp, Glycine max
  unsure (1)..(405): unsure at all n locations
tgtangattatggngtatccatcacatgtggtactatgtggcggtcgggcgatggtgcaagtcaactctccacatccacagatcacacataaacccaccatccccagttgcccaccttcactgagctcacatactcctacgtagcccttatactcgttcctctcaacactgggtccccatcaatctctccaagcttccacaacatccaagcaattcaacatcccaaacatcatgaactatcaaaaccaaggaaaacagggcagaggcagaaaactctgcccaacacaaaccaatatcacaacttttctcacttaaaaaccccagtaacattctcctcgttccaattcgttaaccgttggatcgactcgaaaattntactggacgtctctagcacataagtctaca

SEQ ID NO: 304097 - DNA, 330 bp, Glycine max
agcttatcaaccaatagctcatactttatgcttacaaacatatgtttatatgctgaagatcttatacaaaaaacatcacacatgaacgacaaacatccacatataaataatctatgggccaaagcgacaaaactcatcagacttttattttaagcctctcttactgaacagccggtattactactgcatatctcctaaatcaccgttgccatatgcagccatcattgcttgtgaatatatcatgctattgctcacgtataacttatagaaagtttctgtgcatgccacaatcatatttaagtgcacatatatgagtcaaatacctaacat

SEQ ID NO: 304098 - DNA, 427 bp, Glycine max
  unsure (1)..(427): unsure at all n locations
tgccttcttttatnntttttatcgcgaggaatcttatatgttaccaagggatctacaacactcacacaccttgtttagccaactgagctaaacccctttgatgccttcttttatatatatatatataacttcttttatctatttctagtatgtataccccttttctgaattgatggaatatctgaatatagagcttttgcaacagtcatttattgtacaatatcacaactcactagggtattttttttccatttcttctgatatcatgtagtaattctcttcgggcttctcttcaaaatttggaaagagtttcatctagttcaacagggatgaatacacatggacatccaaaacgtaatgatgattgtgattgcactctctgcctgaagttactgtatgaacctgtcacaaccccttgtggacattc

SEQ ID NO: 304099 - DNA, 444 bp, Glycine max
  unsure (1)..(444): unsure at all n locations
tgctggcctaattaactcgaaattgaaagactatgattattatttacataatgaanatactaagtatttattacctatacttaacataaaatacttatatcactacaaaataaccataaattgggagagtttgatataatttatacaagttttatacacaaaagttagtcgtgttcaccgactaacacaacacacattttctttgattgcttttttttttttacacaacttatttgttatgtgtgtgctgatgctttacctttttctttacaccccattcaactccactcccccaaatttggggtaagtttgccttgaaccatatgctctcctagaatctaaacaaggtatttggagataattatttaagttcggcgttcaattntgacaatgtaattcagctcanaaagggtgcaaaggatacaattattattcaaggtaagc

SEQ ID NO: 304100 - DNA, 438 bp, Glycine max
  unsure (1)..(438): unsure at all n locations
ngcatgcatctgcatccctaanaatcatgttaactacatagattttctacatctaatggccaatctttggaatttgggacgatcggccctctcaatgagtcaatctctttctttctcataaggatggacccttgggtactagtaccctcgtcttcagagggctgctcgccctcgtcttcaaaggactacacgtcctcgccatcaaagggctgcatgcccacgccatcagaggactacccatcctcaccatcagagggctacacgccctcaccttcatagggttacacgccctcaccttccgaggactacatgtcctcaccttcagagggctacacgacctcgcctttagaggacaacacgtnctcgccttctgcttcgtagggctacacgcccatacctttagaggactacacgtcttcgccttcagaggactacacg

SEQ ID NO: 304101 - DNA, 452 bp, Glycine max
  unsure (1)..(452): unsure at all n locations
agcttattgtattattgtttaccttatatttgtttgacccatctcaggctacatctccattttcaccatggtcatacactgtttatatgaaatgacaacatgagagtaaggaataatccttatattggaacaacagaatactgcaacagattctgaaatctgttatccataacagtgcaacaattttctgaattgtaatcagttgctaagttattatctttctagtgctttatccttctagtgctttatctctaattttctttatctgtaatttgaattcttgatttgctttatctgtaatttgaattctcagctctatatatgtaacttatatcaacatcaatgaaactgagctctttattctattcattctctctattctctatacctcacacgatagccactggattaaagagcanaaactgcgtagttaaagtgtacatgctattcta

SEQ ID NO: 304102 - DNA, 458 bp, Glycine max
  unsure (1)..(458): unsure at all n locations
tgcttgtggagcttctatggaggatggatctttgagcttctatgatgtcctctaatggngattntccaccatggaatgcagcggaagacaaaggagaagaggtgagaggaggcgcaatccattaaggaataagccatggaagaaggagcttcaccaccaagatgagccttggataagaagcttggagatgatgcttcaatggaggaaaagaaagagagaaggggggagcacgaaattgaaggaataaaagagggagagaagtggaactttgaagtgtgtctcataagactttcattcatcaaagttacaacaagtgttacacatgcttctatttatagactaggtagcttccttgagaagctntcttgagaaaacttccttgagaagcttctttgagaaaactctcttgagaagctagagcttagctacacacacncctctcataactaagctcacct

SEQ ID NO: 304103 - DNA, 591 bp, Glycine max
  unsure (1)..(591): unsure at all n locations
cacctacatcactccactangtatcgggcgtanactcgaccgacatgcggttgtcgacgactcacatcaccagcaccaaacaaacacaattgaagcgtttgananctgaaaccntcctagcaccctggangcatgcaagctaccaaccagcctcttcctgcgctacttcttggcgcactattcccactgcactgacgaaatatcacggcgaagtgtacgcagccacatcattgctaccatcgccacacagacacagaacaatcctccccgagtccacaacggagaaccaccgaacccggtcatcactcaccaccacatacgcatcccatactgaagtccacgccacatcactcacctgaatgcacgcaaccgcaaacgcccgccacacaacatcacaacgatgagactaagacaaggaagacgacaatacgatgacgaacgcgactccccttggacgcgacaaaacacaacgcaattcatcaatgagaacgctcaccgaaagaccaccacatcgacctacacaaactgcccactaccctgacgaattcaatctactgcgccgataaccataactcacaccgtactcaaccg

SEQ ID NO: 304104 - DNA, 442 bp, Glycine max
  unsure (1)..(442): unsure at all n locations
agctntagaccaactgggtgttgaccgcaaaatgttagtattatctctatttatttgcttggcaaaatcacaatgaacatgttagattgctaccttttacttttgtgtatctctgttgaggatggcatctaacttgattcaaattattatttgttatgttctacaggttanggagatatgcggttgagtcatacttggaacaaattttatcacatggtttcttccatgctgaccctgtgagtttgtacttttagaatcaatatcagaaatctctctatatattatgttacattatatatggattagctatctggtaaattgtatagtaaagccaaaatgttaactgtctttgaacttgctcttatgttgcaacgctagcatctattgtctgagcaatgagatgtacgctacttgtgttttacaattattattcttttgctag

SEQ ID NO: 304105 - DNA, 447 bp, Glycine max
tcggaagaaagtgatgaggtacaagccctaaaggcagagcttgtttgagcccgagtagtcgaagagaagttcaaatccatagccatcaaagtctgaaaagagtatgatgaactaagggacgtcaatatggccaccgctgaagccttggaacgagaaaccaagaaggcccgaaaggaagaacacgtgccagcaaagttttgaagggctttatagggcagcaatagtaagctcaagctccgaagaggtgaaaggaatcatcatgggtcaaaggcatgatcttgaaggacgagctaaaggcttaccttaggtcgaaaagaaatttgtcccaacagttaagcgagactgaagggaatatgtgggccgtcatcgatgagtgcaaagagaagctaaatctagcggcgactcacgagcaaaggctagaggatgagtacgccaagatatcagcag

SEQ ID NO: 304106 - DNA, 443 bp, Glycine max
agctcgaaacatatagattgaatcctagctcctcttaaggacttagttattatatctgtcaactggtcattagaattgatgaacccagcgataatctccttggacaataatttctctcgaatgaaatgataatcaatctctatgtgtttagtcttttcatgaaagactggatatgacgcaatgtgaagagctgcctgattatcacagtataacttcatttgcaccacttcacaaaattccaactcttggagaaattgtttaatccacataagttcacatgtaaccatagccatagatcgatattcagcctctgcactagatcgagcaacaacagtttgtttcttgctcttccaagcgataacattccctccaataacaacacaatatcctgaggtaaatttgctgtctatgggacaaccagcccaatctgcatcacaatatct

SEQ ID NO: 304107 - DNA, 565 bp, Glycine max
  unsure (1)..(565): unsure at all n locations
ccaccctctatccagcacaccccgcgcacgagacgatggagcgcacccaancccaccagaannaacgcggaanaacctgtagaccgtcgtcgtacgncacaccatagaaactcaagctcgcacactcgagaagcacgacaacattgtatatagacgagatcatcttctctacatcccgcctagagccgagacgcacccatagaccggagccaacaaccaaattgccacagaaaaccaatacaaaccctccagccaccggagatgacatcacaaagaagacaacagcgaagcatcccccctctaagtatgcaccgctgagagatcacacgcagaccaagctaaagacacacacaaaacatgcactcgcttaaccagcgccaaaaacgaggggcaaaccccgtcagccatcgccgcatacgcttcgaacacccacgcctgcatacgaccactgacgccgncccaaccaaaacgagccacctcgaacgagacatgcggatgacccgacacctgaatcataaacggcagaaccctgagtccatccccactacgcgcgaacgagccgaag

SEQ ID NO: 304108 - DNA, 377 bp, Glycine max
  unsure (1)..(377): unsure at all n locations
agctntcaaaagcatacaagctctgtggaatcttcctgtaaatctagctgtcaagggggggggggggggtgaccatatgaaacgacaactcgatagtaacgactattccttgtattgagacaacataatactgtaccggattatgaactatggtatacataagagcgccgactatctctgaaacgtaatcagttgatagattattatctttatacagctttatccttatagtgcttgatgatgaattacctttatctgtaatccgaattctcgacacgccccatctgtaagttgaattctcacctcgatatatgtaacttatatcaacatcactgagactgagctcattattctatacattctctgtatactctata

SEQ ID NO: 304109 - DNA, 389 bp, Glycine max
  unsure (1)..(389): unsure at all n locations
ttgatgtttgtgttgaatgcattaaaggtanacagaccttatgcacganataagtgcatatagggctacagacgtcttagaattgatacatacgaatatatgtgggtcatttcatacaccttcgtggagtggttgacaatattttatatcattcatagacgattaatccagatatgcatactttgttcttatacatgaaaagccacaatctttggatgtgttaaaacatttaaagtttaagttgaaaatcaactcaacaaaagaataaagtgtgtcagatctgaccgtggtggtaaatactatggcagatatgacagttcaggtgaacaatgtctggngccttttgccaggtatctagaggaatgtggaatcatcccacaatacaccat

SEQ ID NO: 304110 - DNA, 401 bp, Glycine max
  unsure (1)..(401): unsure at all n locations
agcttgagcatcctataccgtgttgaagatatctcatatgtcttcaggactgaactgattcatgtgctaacgaggtttcatggccttgctcgacaagacctgcacactcattgcatagaatgtcacatcgtctgctccaacataatgacctcagatgtcacatagatgatcacacactcactgaccgctttttctccttcattacatggagtggcacatgactgactgaattaccttgctccaaggtccatcgccagctgggatgaccttaatagactattctcataacaaattatgtctgctttcagcaccacatacattangaatgatatctccagtcttacataactcctcggatacagccctgttgactactgctagagattacacaactatgtgcc

SEQ ID NO: 304111 - DNA, 419 bp, Glycine max
  unsure (1)..(419): unsure at all n locations
agacggtcaacaatgaangagccgncgattgtatctactttctatcctgtatatgacagtcacacgacttatgagcgttcgacaccattacagcttcaaggccgataaagccatggtcattacctcccgtagcgacgcgtgcagctcatggactactagcatgctgatttactagaagagataccgcaccggtcgtggacatcactggttacccccatcggctggtcaatgcacatgtagccttgattctatgtcacgcttggccacatacgacgccgacatgaccactgtcctgcgaactggtcagtgacccctattatgctgagctatagccactcatggattccgtactgctggagacgccagtatgcactatggcagagaggaaccgttgatggtcgagagaggcatcccagtct

SEQ ID NO: 304112 - DNA, 219 bp, Glycine max
agcttgttcgcacatcgtccgcatctatgatattcactctacaagggctgaagtacatgagaccttaaatcctataacgcaatgcggccactaatagcgggcagttaacttgactgcgcattactgtcaatgccgaaagtattctgcactttactatccatgttcacacattattgcaacttgtgcttatgccagcatgaactacttccaatatataca

SEQ ID NO: 304113 - DNA, 217 bp, Glycine max
cagcgcgtactatcagaagacgtagggaaatacgcctctcttttataaatcgcctagcggaaacatacacgctgagcattatttcatattgtgatgacgcgattcaaccatccactacttagacatgtgtaaagcgaccttaggaagacgggacaacacatgacggccaccattggagggcgagagaccagatctgaggaatacgcctttccatact

SEQ ID NO: 304114 - DNA, 409 bp, Glycine max
  unsure (1)..(409): unsure at all n locations
agctctctagctttncganggtgtatattcgactgtctttttgtgctataaagcgagggaatgtgctcagatatgtggggcaattttggcttgctttgctgcttgattgggttggattgagggtctgtatgggatggccctaggcctataatgcattctgaaacaatgggacatgccacattgtacccgttctcttgctattgatacctaaacgcgcgcccaccaagtgttcggtgaaatgcctcaatggcattagcgcgtgactcttgtaaggaaacaacccatggggcattttggattgcacatattatctattttttcggacatgcattcattcccgacagacgctagagtatttgcccacatatatcctatgtctaggaactaaaattctatgcacaatgaacac

SEQ ID NO: 304115 - DNA, 440 bp, Glycine max
  unsure (1)..(440): unsure at all n locations
ntgagggtgcgcagccgaccatcgatacataggagagttcctatattgcggctaccatcacgattatcgtcttctatttgacacgatctgcactgcagactatccggaaccaaatgacaagaggacggacaccgccgaacgaacgcaaccatcatgacgttccaagttaggactcaggaaggctccaagttagggcaccgcgtaacagctaccccagtgagactgccttgggagaaatgtattagcagatactcatcaatgacgatgcccttatcgttcgacgatacataccaggatggttcatgcggcaggtaacccccttgtactagtcagagtacagcaccatgaactcgcgaggggtgacgataccgggaaccacgaacaccactcctaggaagcaaaggcacaactgtacacgctcaaggacgtgaccgatctcg

SEQ ID NO: 304116 - DNA, 391 bp, Glycine max
agctcgttcgcacatcgttcgtgtgtatgactattcactccacaaggtttgaagttgaggagaccttcaatcctattacacaacgtggccgacaaaagtgggcagttaactcgaatggtcattattgtcaatgcagaaggtattctgcgcttcactatccatgttcacatattattgcagcttgtggttacgtgagcctgaactactaccaatatatagatgttgtttatacaaatgagcacatcgtaaaagcttactccgcacaatggtggcctcttgcgaatgaagcgactattcctccttctaatgacgcatggacacttatccatgacccaacagcaattcgtgcgaaaggtctagctatatcaacaaggataatgaatgagatgga

SEQ ID NO: 304117 - DNA, 446 bp, Glycine max
  unsure (1)..(446): unsure at all n locations
tcttggcactgtcattntcgtggcatctgaggggaccattattacatacattctttgtcccaccgaatataactcgctaagattttctggggaaacaaacgatctgcataattttctgagatgaagaaagttaaaaggaagagaatctgcagttggaagatctctcagctcacgaatctctaatgttgatggcttgcttttcatactcaaattaaagtgcgtgtgtgtttgtgatcaattaattaatgttgagttttaatcaatggagtatcagtttatatatatttacgacagcagcactaaactttaattaagaaaatatataccactgacatgaattattcaatcaatcagcatgacgacatatcaatgctatccgcattaatataggaataaaagtacaagtttatattattaataattaataatgttcaatgaaacatgga

SEQ ID NO: 304118 - DNA, 431 bp, Glycine max
agcttttttgaaggtgccttattgtgtgttgttttaccttcctgagacaatttttacgttaaccctccccaaaattaggggcatatcatgactaacatccttatgctctattaaaccctaatacaaggtaggagataattaaagtaggcttaagggttctacaaaaaacatgattatcatttttggcttaaataacgtgcaagggataaattatcaccaaaggttggctttttggctaagtggcttaaaataagaagaaacattgccttgatcattaccacctcatgtaattaatctaacagtctaagaatgatggaaaatcgggaaattaaaaatagacgttctctcacaagtaagtgtcgcacaactcaccgggacaaaacaaagttgttagcttatcgcaccatgatttctctcagatggactaacct

SEQ ID NO: 304119 - DNA, 422 bp, Glycine max
  unsure (1)..(422): unsure at all n locations
agcttcttatccatggcactctcttggtggcttaactccttcttccatggcttattccctagtggatgacgtctcttctcacctcttctcctttgtcttccgctacatctccatgatggaaaatcacgattgaaggacctcattgaagcccaaagatccagcctccatagaagctccacaatcaagcttccaccacgtaaatgactgaagacattgaagtctttgaaatgtaaatgaagacattatagtcttttgaaagcgtaaatgaatgaagacattgaagtctttgaaatgtaaattaagacattgtagtcttttgaaagcgtaaatgactaaagacattgaagtctgtgaaatgtaaatgaagacattgtagtcttttgaaagcgtanatgactgaacgcattgaagtcttttgaaat

SEQ ID NO: 304120 - DNA, 441 bp, Glycine max
  unsure (1)..(441): unsure at all n locations
ntataagtgcgggtctgggagacgaaggtcaagtgttcgcgatatgtgaagatgatgttccaagtacttcggatttggtccgaccatgccctcctgatttccagctgggaaattggcgagtggaggaacgccccggcatttacgcaacgagcataatgtaaacctttacggttttaaaagctctatagttgggcctaggctttagagttttcattntgttaaggctttgtgtcttttgtttttgaatttataatacaaggatctttcttcatctgttcctggtctctacccattctcattcatttgcatgtttacttctttntctgaaacggcagattcgatgacgagtcccccgaaggtactaatacctgngacccgtctatcaacttcgagcaagaaatgaaccanacggaagatgaaggagatgaggatgtgggattt

SEQ ID NO: 304121 - DNA, 448 bp, Glycine max
agcttatgtatgaaagatgttgtataagtttgtattgaattttttggcagcccctcaacagaaaactacatagaagatatgaaggcagaacacttagagaaactagcaaagctggaagagtggtgtaagcaaattcttattattactttctcgataaggatatgcattttgccaatatttttaagtacatatttttttatactgaagaacaaattaaaattgtaaattactgatttctttatattcgtaaatgtggttcaaagaccatatcagcattaagaacaaacatgggctttagcttcatttgacaatttacacttgaaaaatatttatcaacccaatatccaaattagaggaatgactaacatttcacagtggcaatgtactcaaaatattgaatgttattactgtaatactttagaatgaaatgagagatttatttattgga

SEQ ID NO: 304122 - DNA, 451 bp, Glycine max
  unsure (1)..(451): unsure at all n locations
ntgacattctaacttgttttgaaggttgggttannactaaatgttttttttatggataaatgcttacgagtctacttacatgatctaattgatttgaaggcttaataataatgagatcatgattttttatttttctaaatattcattatagacttaatttatggtgtcatctttaacttaccatcacttatgactatcacccaaaaaattataaccaagattatattacatattacttttcatcaaatcatgtttgacttgaataagcctcacttgttaaaaaaatctaaaatcaaagaccatcaagtatttatcatatatttcacttgttaggcttgacttaatcattcttagcttatatagttatgtatgtcaaactacttgttaggggttggactntcaaataggacaaatcattaaagtaagctttaacttccacttgtcaagagtg

SEQ ID NO: 304123 - DNA, 447 bp, Glycine max
  unsure (1)..(447): unsure at all n locations
agcttgtaaatgttntanaatagttaaacaattcttganaactattatctactctaacactcttcttaacactctgctaaaattcatataacttctatgtggatctcatcatccgtttgattagtcacatactaaattgtaacacctacatgaatttcaacgattaagaaaaatacatttaaaaaaatagaaaatatattaataacagtcttcacagttctaccagtgcaaacacccatttgatacttgtctttatctaattcttcttattacgtattcctctctcttggatagcaatgtatgtttttccccagcataaatactcgtgttgtagaataagggaggagagggaatgtaatctccaatcccaaattgttgatatcccttgaaattcttggctactaccactntgcttattatagctaatcacgaacaaacttattgtag

SEQ ID NO: 304124 - DNA, 434 bp, Glycine max
  unsure (1)..(434): unsure at all n locations
ntgctggcgttgagaagatatcacatgtttgtcatcatcaataagttggagaatgtgaatgtatgtatacatgnatttgatgatggcaaaagaagaatcacacaatgctcatatggcttcaagattaagacaagggatgattcaacaaacaaagacttgcatcaagatttcttcatgatcaagccttgccacacaatgaaagggttcaagtcattcaaggcacatgcaatctattaccaatggctcgaaagtgtgtcatcgattacacatcatatgtaatcgattaccagagactttgaacgttgggaactcagatgttacatgacgggtcacaactcgtccagaaacactattgtgtaatcgattacactatatctgtaatcgaatatcagagaggattttcaaggcatatcgccaacagtcacatcttatca

SEQ ID NO: 304125 - DNA, 419 bp, Glycine max
cagctgtcagaagcgagtagaagatcattctttcagagggttatgacttatcacagctctacacatgaagaggatcgaggacacaccatacctcaaactaaagtgcttataagctcatactaatcaatgtacacatacctccagcagaaggcacactatctgagcttcagatgctgactattatggactacacttattgagctcatcatagtactgctccagagaagaggacaactttggcccgacttgtggaatgtgcatatggtcattcccagttcctttgagaagacatagaatcattagctgcgagcaacatcagcttgtaagcttctgtcttatagtctgagcacagaatatgaacccacacataagactgtgaatacggaactgaacataggaaaccttgatgtgtgtctgta

SEQ ID NO: 304126 - DNA, 405 bp, Glycine max
tatacaaactgactcattacctttgttatgcaaacgctattatgttaatctagttcagaaggatcaatctcatactccgggacttcacgagcattgtgcacatgcatgggagccatctaccaaaaaaaaaaaggacgttcacagttgaaacagatatcatataccgactattctaaaaggagtttaacaattatgcaatgtcagatgaattggattatacgtaaaaatcaagccttgttttttactctctaacagtaattacgatatgattatagtctttctagtgaataatacataaagataataatagaagaaactgttttgaataatagttacaaactgcttcatatatgtagagacaaccaactgatatgataattggtaactaaacatatatcataaact

SEQ ID NO: 304127 - DNA, 211 bp, Glycine max
gacgattgtgagggccgtactactttaaaggatcaccttccaagtgcaaagaaatggcgtgattcacccttaagacagaactacgcaggtctgattgtctcatcccaatcgaggactacgtacgagcaaagggacacacctttgttcaggcctatcgagagttcaatatataaatggattaaatgatttacggacattccagggaacgtcg

SEQ ID NO: 304128 - DNA, 387 bp, Glycine max
  unsure (1)..(387): unsure at all n locations
agcttgtccatgtcaagagccaacaccaagttgtatgatgttnttacaaaaatacttccaggcccaatttttggtaaattcattgccaagttgggaatgattaacatctattcgccaacttgagggggtatcacgattaagcagttggagttagttacaagaagttatttgagtagttagttggttatggcagttagttggttactagaagttatttgagtagttagttggttatgacagttagttagttactagaagttatttgagtaagctagttggttactcaagttagttattttctgtctttgtataaataaaccaactctgtaatactttgatgaatgaatcctaaaaatggttttcatctatctttcatctctgataaaa

SEQ ID NO: 304129 - DNA, 391 bp, Glycine max
gattcaaagaatatgtggaaaagttgtttgtaaaggctgtcacacattgtcataatatatctcaaaatgcacgtcaaggtcttgcttttatagactctccaagtctggtcaagaaaaccattagaagagctataacctttagaaaaacctgaaaaccattggaagagttacatctttagatttttgttcagaacttgtcactggtaaacgattacaccatgcatttttgtgaaaggatgtgactcttcacaattgaatctgaatttcaacgttcaaacacattggtaatcgattaccaatatctcgtaatcgactacaccatttcgaaatcaattgaaccgttgtacattcagttgaaagctcttgcaaaaaaatcttctcactggtaatc

SEQ ID NO: 304130 - DNA, 315 bp, Glycine max
  unsure (1)..(315): unsure at all n locations
gatgagcctatctggtgagattatacttaagatatataagttgaagttccatcaagcctatattcaccatttttttaataatttatattttgcattcttctatatttgtataaatttagagcatgaaagcatttcacaaaatacagactacagaactcattttgaccaatataggatgatatagttggtcctaagcctagtagctggacttcaaatgaatatggtctctataaaatatggagtcggccaccccaatacattgtcacacttggctacatggatcangctacgccgagtcgactcacctatttacct

SEQ ID NO: 304131 - DNA, 325 bp, Glycine max
tagcttacaaatatgttataaattcttgcccatttttgaaatcagatcacagctagatcacatcagatgtgatatgatctagatgacatagtatctatatgagatgccatctaaatgatatctacataagagaagatctaacttgatagaacaaagctagctgccctcttcaagtccaagctcgagtctggattcaagccctcgcccgattctggatatagacccaatgctttattgagtcctgaaattagagtaatatcatcaaagtagctgcgtggacccgaataatattactgcctaataaatttgacaattaggactaatc

SEQ ID NO: 304132 - DNA, 214 bp, Glycine max
ctttctccctctccctctcgcgttgctattccctatttcttcttctttattgaagctccatcaaagctgcaacctttgctcaccatttctgctccacatcgcagaaggaagccacttttggaatcgtgaaatgcacctctacgttgtgggacttcaaattacaagtctgggtagacttcttctcacataaaatttagtgggtatacgggtgttt

SEQ ID NO: 304133 - DNA, 435 bp, Glycine max
  unsure (1)..(435): unsure at all n locations
agcttgtcatcaagttcttgatacaagaaccttatggatggnggtatatattaacttgcatgggctgtatgactgcaacatgattacactgaatttgttgtagtatgaccacaacaagttatggaacanaactcanatataatttcttagaagccattatatcatgctctaattaaaattgaagttaagcttctataatgtgtattaaaggtattattagagaattatatgaattaactatgtgaaactttaatcttgattgaagaacgacaatcaaaatttgcatataaattttatcctttntgatagattggttatggtgttattctttaaataatgagatttacgctttgattgctaagttttgctgtggaattcttggagaagtgtgctacaacatcttgaatttctaggagcttcacttaatcatggact

SEQ ID NO: 304134 - DNA, 430 bp, Glycine max
  unsure (1)..(430): unsure at all n locations
cgccgcccagctcgcccaggcgagcaaggttgcttcctacatatgcatcagccttctggaggaatcttctggagggcccaagtgggcctagttgctatttgcacccccctttctatttttttgtaattctttttccgtaacgttacgaaactttacgaatttcgtaacgatacttattttccttccgtaaggttacgaatccttacggattatgtatttactcttttttacctttcgaagaagttacgaaaactcacgcattgcacaaaaacacctcttttcaacttccgccacaatacggaatttcatggatcgcgcaagcctgcttcctttngatttctgagacgtctcgggacttcatttattgtgcaacataggacgccaagtatctcaaagcggctaaccaaaggtggcatgttatcaagtaata

SEQ ID NO: 304135 - DNA, 349 bp, Glycine max
agcttctacttatgtggcagggcgggcttccttcactattttgattccagtgcgagctctgaccactgttcttccttcatgcgacgctacttcacatgtacgcctgagtgggattatagactacaccataatacccaccattttctaggggttatatcaagctacgcatgccgccaatgaccttgcctaagaccgtcctagttttataaccgttccccaacatgactcataccaccattacacgcgcttcatacagacattgtagcccaactagggagaccacggaggaaatgctgaccacctgacacgactgtaaagcggctgctaacgattcttctgcggataccac

SEQ ID NO: 304136 - DNA, 447 bp, Glycine max
ctgatgatatggtcttcaccgacgaaaggatcatagtgggtctattaagaggcaaatctgatcatcatgctttgataaatgccaaaaaaaactagggcaaatgaagaacaccacctttagcacatacctatatcaaccacaaagtctgtctaccgcacttccaatgacgaacaccacctttagcacataccaacaacaccaaccaagatatgaattttgcagtgagaaagcctgtacaattcaccccaattccagtgtcctatgctgacttgctcctatatctacttgataattcaatggtagccataaccctagccaaggatcattaacctacatttctccgagaatacgactcgaacgcaacgtgtgcttgtcacggagaagccctgaggaattccattgagcattgtatggctctgaagcataaggtgcaaggtctaattgatg

SEQ ID NO: 304137 - DNA, 449 bp, Glycine max
  unsure (1)..(449): unsure at all n locations
ggttgctttcttctttcctctaatgtttctgttagcctgtttgtgttgatgtcgttcagcacactgctctttctgctccttattgcttagttaggaattttagctttgcagataaagctcagaaagttttatagttgtaaaagggtaatttttttctgatcttattcctcttcccctacatttaatttcattactttttccacttactatgttgttgtcaccataaataatttattgattatatatatatatatatatatatatatatatatatatatatatatatatatatatcaatatgagtactaacaacacatataattgaatatgattagatatatatcgataaaacatatctgataatttctcacacaactttcagttgtgcttatggtcctatgcagataatnggtcttgtgagtagacaatagttgacagtggagccagct

SEQ ID NO: 304138 - DNA, 340 bp, Glycine max
agctcttagttcctctcattacgttcttgaaatatgggcacggagcaaacacgctacgtgttgtttccttgatattaccatgcatatctttgcaatgtcatgtttatgtgcgtttatgctgagttattatttgatggcgttaccatgcttgctcgtctagtatattcctgttttgcgctatcaaccgcatgctctcgcgcatatatctatattgcgccatcactcatgtgttgcattagtctagtaattttgtcacgggaagtcgtaagggccgaatcacctttctaaatgcatacatggcgaactgtggtgatgactgctaatgaaccatgacgcccga

SEQ ID NO: 304139 - DNA, 445 bp, Glycine max
  unsure (1)..(445): unsure at all n locations
tctagccaaatggacttaccttgaattaattcctttgatagtctctttgagccttgtttccctttccttgttttgaagctcactacaagccttaaatgaaaaaccatgatatcaccatatccttaaggaattttggagctttggaattgttttgggaataagtgtggggggttttgtttcatacgataacttgttttgttggctatgcttcatgatgtattttgggccatacctgatgtacattgtatattggttaaatgttggacatgctgaatgaaatgttgtttctcaaaggctatagagtaaaaaaaaattgaaaaagaagaagaagagcaataaagtttagggaataagatcttaaatgacaaaagaatgatgaaactcttggttctactctntatgtttaaantatatctttacttcttttttttttcttaatatgaac

SEQ ID NO: 304140 - DNA, 412 bp, Glycine max
  unsure (1)..(412): unsure at all n locations
agctntcatatgatggtggtagagaggctaacttaatcatggtagcatcttcatcctctatcttaacatctatatctcttaattccatcaaaatagaattcaattcatcaagatgatctttaagagatgtaccttctttcatgtgtaaaccaaataaacgcctcttcaagaagagcttgttgcagattgacttagtcatatacaacttttccaacttgagccataagccacttgcagtttcttcatttgcaacttcatataaaacttcatcagacaaggaaagcaagattagtgagtgtgccttttcttcttgttctgcaagttcttcagtctttgaaatagaggccttttcttttgattcagaagccacttctttcttcacagatgcagaagcaacaatagcctaaacacc

SEQ ID NO: 304141 - DNA, 446 bp, Glycine max
  unsure (1)..(446): unsure at all n locations
ntaggaataagattaagagacatcactcttttgatagaattcaaattcacatgtgcaagcctagcatgccacatatcagaacattcaacatttgcacaaaagaagaaacactagatattttattaatagaaagagatataagacttaacttaaacatataatcacaaatgtagcctttaccaataaaaacaccatgtctagtaataacaactctattggactcaaaaacaaccttgtacccttgttggactaacaaagaagtacttattaaattttttctaatataaaaaatatgatagattccatctaaaacaagaaaattccctgaagatagctctagcttcacttgccttctcctaacacatgtgccatactctcattcctcattctcatagtacgtgtgcttgattcctgatataaagaannataattttttatcagcacac

SEQ ID NO: 304142 - DNA, 434 bp, Glycine max
  unsure (1)..(434): unsure at all n locations
agcttgtaggattatggngtacccatcacatgtggtactaggtggcggtcgggcgatggtgcacaacaagttgtccacatccacaatgcgcgcataaacccaccatcccctgttgcccacctccaactgagctcacgtactcccacgtagcccatatcctcgtttctctcaacaccgggtccccatcaatcctctcaagcttccacaacatccaagcagaacaacattcaaacagcacaagctatcacagccaagcaaaatagagcagaggcagaaaactctgctcaaacaccaaccaaaatcacagctttttctcgcttanagaccccagtaacaattccttcgatccaattcgttaaccgttggatcgactcgaatattctactagaagtctctagtacataagcctacattgtgaccgttgggatctacta

SEQ ID NO: 304143 - DNA, 438 bp, Glycine max
  unsure (1)..(438): unsure at all n locations
tccttttagtgcgtcacgtttaataccaagctcgatggtggttctatcctttgatggtactcggcgggaagtgatgggggaaatcgacattcccattcagataggcccccacacttgcaacatggtgtttcaagtaatggatataaatcccgcctatagctgcctcttgggaagaccgtggattcatgccctgggagtggtcccttcaacgcttcactagaaattgaagttcgtggtgggcggacttttattgatagtgtcnggtgaagaggacatgttagtgaactgcccctcctccgcaccatacatagaagcggcggaagaatcattggaaacggctttccaatccttcgaggtggtgagctacgcctctgtggaaccaagtccgtcgctaccttctctctccaaagcggcataatggtggcgccgtgtatgctc

SEQ ID NO: 304144 - DNA, 367 bp, Glycine max
agctgggactcatgagtggtaagtagaggtctatagggattgttcctgttgttgttactaatgcttttccttatggtacagatgagatcaaaagcgactccacaaacaagagcttcaaggtcaacgaacatcgacttaagtcattcttcacgaacccttctttagtggacgtagtggtggaagagacatccttactgcaccctactcttcctccaccatgacttaaggagtttttcttttcctatctccttctttgcttttattacacttggccgattctctttgatgatttaattgtttttaatctggtaattgtgctacattgacgacaatgtgttgtttaagtatggggggggagtgttctttg

SEQ ID NO: 304145 - DNA, 444 bp, Glycine max
  unsure (1)..(444): unsure at all n locations
tnctttggaccttgaacaggcaactaactcctctntcagatctatgctatgtgctcgcgactggtccctctcttcccttcgcagcttgagttcactattgctaccccacagagctccgcgaaatttattccagccatactcttccttgcgagccctcttggtctcttgttcaagggctcttgcggtagttgcattctcttcccgtaacccggcacactccttccgaatgtgtgtagtggccaacttgaacttctccttggcaagtttcgcctttcctaactcgcttttgagagcttggacttcttcgtcctgttccggtgcttcaaaactctcttcgctgacgacttttaacttggtgagccaatctaaacctcgtatatgaactttcaaccattcatggtacccaccaatgatgccattacgaatgcccctaagttcttgatc

SEQ ID NO: 304146 - DNA, 414 bp, Glycine max
agctggctacattgatgcatactgactatggcttgtgcgattttggcacttaaatacgggaggctcaagttgtctatcaaagaagatgatggtgagagtactaccctctattaaccaccctaatcaactttgtgaaggaagatgactcagcatgaaagtgataacgagttttccgcaggagtcagactagagctaagaagccgctcgagctaatacatgctgacgtctatgggcccatcaagccatgctcactacgtaaaataattatttcctccttttcattgatgactcttgaagacaaacatgggtctattccgtatagcacaagtcagaagtgttttctgcccttaagaagttcagagctacagtggagaaagaaaatcgcttatttatccacgccatgaggattgaccg

SEQ ID NO: 304147 - DNA, 545 bp, Glycine max
  unsure (1)..(545): unsure at all n locations
cccccactctacacgcaccgcggctccaatgatgaacggaccccacattcagaacaaagggaaaatgtgctcgtcgtcgcaacctaganactnaactgacggacgcgacggaaagaatatggagcaaaacgcctccgcttctattgtatagaccngtgcgccagacccgcgaggcacgtaaagaaacatgcaacattccgcacacacgaggaaacactggaacattaagtaagacaacgagatgctagacttacgagctactgtaagtgctagacgtccgcctaccaataataacacacacgcaaggcctaagcactctactgaagtggaaaacaacctagcacacatgaaggacgaacaaacaagcacggtacatagaggatgtaatatacaaaatatgagagatgacatccaagacgagaaaataccctgaagatggaggaaggacacttgccggatcaaacaccagaccctacgctcacccctctgaccacagaacgagcgcgagatacggaatgaagacaacaatctatggactcaggccg

SEQ ID NO: 304148 - DNA, 130 bp, Glycine max
ataacatattcatgatttgttggcatgctcaccactgttcgtttctttacgaaactccccataaccaaaaaagcgcaaacgcacccctataacacccgatccaaaagtaagatgggtaaggaagagggag

SEQ ID NO: 304149 - DNA, 416 bp, Glycine max
tggcttacatgagtctacacgtacgagggatcgaggtttatttctttagtcttcagcatagaacacacgaacattcttaattatagaaatatctttatatgcatcagctcgtttattagaaagacccaacgcttttaaaccactgtcgtcacttttaattggttgaggttattgtttttctaattaggatatatcatacttttacttcaattcacaattattattttctgtcaacaaaatgcctgattattgaacaaacgcttgccaaataaacaagttccctgtgttcgatactcagatcattccgttttaattttaaatacccggagcgcttgctagtatatcacttcccctttgatatgatgctgaatgaaacttgttcacatttaaggtttttacaagggtcataaagaaac

SEQ ID NO: 304150 - DNA, 400 bp, Glycine max
tctgcaggcgagctgcacgcgtgcaagcttagggataccagcagcatattatagactttcatgcttgacattattaaggctgtatacttgttcaaaggacacaagaattttagtctacaacatgtaacagattaacagttgccaaggataaattacctgtactatcaagacaatagctctctgatgatgcacacggcagtcaaatgatacgctccgcaccttgctagcaagtgatgcagctccacctgagttactatttaccattagaacgttgaaagtagaacagatcacatagaaccacgatggaagaaaaatagtataagtactttttctcgtacagacgaacatactcaattatgctaacgaaattctgaccatctgcatacacagctctgtattc

SEQ ID NO: 304151 - DNA, 449 bp, Glycine max
  unsure (1)..(449): unsure at all n locations
ntatccatagcttccctcttagtttcttgaagacagagttaatcaattntgaatttccccaccanattcctgatagaggcccatttaatgcctctacccaaccctctaatgttgtaggaaaggatattcatctatgaatattcctattccccagctccatagcttttttcctgtcccgagactccatattagcaaagctgtgaataccttcatcttgttctatatcagcctgtatgcctataatttttgcaaggtgccattgctgtttggcttcttccatgacttgngaattgctttcttctatactttntaattcgtcatatgcttcagagactctgtgttttgggcctctgtcttggaactcacttacatgttgctgatcaataccttcatttaacatgnttggctcttctgctacaggctcgangtacttcctctttggtttgata

SEQ ID NO: 304152 - DNA, 373 bp, Glycine max
agcttgagatgaggaagtgtataacggtgaacttcctgcttttattcgttgaccacagagtggtacctggagatatgtcgcggcggtcatgagaccttgtggacgtcaggaggggtgccattgcccaaaaccaagcttgaccaattccaacccaactcgggcatagtcagtcagtgagaacctgtgatgtacctaaacaggcgagctgctggcagtcaacagataataggaacaaagaccacagagcaaggaggcttgtggtggctggccaactatgaactcgatcgatatgtgggatatggcctctggtaatcgattaccaagggttggtaatcgattacaaggcttatgaatgaagacatgaggctaacat

SEQ ID NO: 304153 - DNA, 424 bp, Glycine max
  unsure (1)..(424): unsure at all n locations
cgtgggntaaagtctcacaatagtcacgtgttaatgtttctttgttagccgnggctatatgagacatcttgcgaaacaaagtcaggttagccatgactcgcctgtgctttttcttgcatgccatatgtagcaaagtcgttgatccctgcaagtatgatgagcagtgaaatgaggctgcaattatactgtgccagttggagatgtattttccccctgctttctttgacataatgattcacttgattgtgcagtggatgtacccggttgagcgatacatgaagatcttaacagggtatacagagaatcaatatcggctagaagcatctattgttgagaggtacatctgtataagaagccattgacttctgttagaatacattgagaacgctatacctgatgacctctctgagtctcgacatgatga

SEQ ID NO: 304154 - DNA, 437 bp, Glycine max
  unsure (1)..(437): unsure at all n locations
agcttgctatagtcatgcagtgctttgcaagttccttacccatgttgggaaattgaagtgtgtgatcgactacctcatantttgggaatttaagaaagtaatttttgaccatttttaacctctaaaaagttatcaaaaacattataatgattttttcaagcaaactgccacaaagattattttgaaataactaatattaattgtcacattattatttaatagagaaatataatgatagggatcaaaatcaaattaaaaaataaattaaagataaaaaacaatcccataaaaatttaaaaataaaaacataatttatccataaaataatatatattttccgtcttgattgcatgtatcttttaagttaaaataatcatataccaatcgataagtggttggtggtccataanatattactatatgcaatagctaatata

SEQ ID NO: 304155 - DNA, 433 bp, Glycine max
  unsure (1)..(433): unsure at all n locations
tattgttctttacaatatcatattattaacatgttaagcttgtattaaggttcttgtgtttctaattttcaggtacaacaactaataatggtgaacaatctttcacagttgttctatagtcaaattatttggcagtggaaggaggaatatatatttggtgttagttttgggagctactaggtgctgatgacaactactacaatgttcaaagatggatgagtgtttggtgtgaggcaatggcaaagcttttggtagggatgtgcaaaatttagttgttttatttatttaaaaattaaactgaacagaactgaattgtttaaaatagttggtttcttaattcanataagcaaattggtttagagaataagtcccanattgattntgaagaaccaattctaaattgattttgattanactagtttcgaattgattt

SEQ ID NO: 304156 - DNA, 508 bp, Glycine max
  unsure (1)..(508): unsure at all n locations
gtangaaacccctttgaaacttttgacacactggtagatcctctagagaccacccgcacgcacgcaagcttcgcgatcttgaacaggttctatccaattcaataatcatctgctcatcgaaaaccagatcaggtgcctgattagatctggaatatgtgtaattgctagcgtgtcagctggcgtaattaattgtgtgcaatggtgagcgattacatgcttgggtgattgagtaaccgacagtgactcgcctctaagtacatgattcaacatagattccctggtcgcacccattgattatgcaatagaaattctgttgactactagatatacactatgtaagaagacagagactgtctggaggatgcatctggaatatatgggatacgattcgccatgaacaaactgcgtaaagaacaaattgcctatgtcatcctacaccatactggagaccattggcttacaacaaatagacctataatcttaggcattatgtcagtgtctttctccn

SEQ ID NO: 304157 - DNA, 438 bp, Glycine max
tcgaaggggactcctgcacgtgccaccaaaccatattctcatcatgttattggattctattgagcatatccacatgattgattactgtctgatgccctatgcgtgtgtctccataagaatcggattttgcacctattatattatactgctgcatctgatccttcaatagcgccggtcattgaattccccatattagccctcttttgtacatgccattggggctttcgcgactctcaacaggacttttttcgtatgttcatttttagcgaaggagatacctaaccctaacgatatcccctttctgcccactccttgctgaatattctctacattcgtgccttctcgaacattcgactccagctgtctgtctcatgattccgtaaatcattagatcgtgactcaaagcattggatgacctctcattatctatataccatg

SEQ ID NO: 304158 - DNA, 441 bp, Glycine max
  unsure (1)..(441): unsure at all n locations
agcttggccctccactacctcctccacccactctangctattatggcccgaatccaaaccctgttcagaacctgacccagaagaagctctctcatttcacctccaccaaatctcgaagctacatcagaatcctctataggggccctctctgtcgccgcttgaattagcgccagtggcatgtcgatgcatggcctccccgccttgcacttttgcctcaatgcagtgggaaacgatggcgtcatcattgactcgggcacctgcgtgacccgacccacctacattgccctacaagacgccttttgtgttacggcctcgcatttgaagcgtgtgtcggagttctcactcttcaacatgtgaagacctatccaggctcacgaaggtgaaggtgcctacgccgatgcatttggctcgtggcctgacgagagcagctcttcatctaat

SEQ ID NO: 304159 - DNA, 296 bp, Glycine max
tcgacgatctggtccgtaacggacagaggatcatcactcttctattactatgttatactgagcattatgctctggctattgctacttacctgtatggctgacgaacaacaccacctttagcacatacctgagaaaaccacacatgatgcctaccgtgcttacaatgacgagcaccacctttagctctaaccaatatctcctaccaccaaatcatttttgcatggagtatgcctgttcaatacagcccatttccagtgacctatgctgacttgctcctatatctacttgaatattca

SEQ ID NO: 304160 - DNA, 430 bp, Glycine max
agcttgctgattacattctccctctttttttcaaattcttaattcttcttgacatcatcaaaatcttcatgatttacattctccccctttttgatgatgacaaccacctgtaggttaggagcaacaacaaagaaaaaatatctatttgcatatagtttactcccccttggttttgcaatgattgcttatatgagacagttgaagatttcatatttttcatatgtaaacaaattgtctcataaacaatagataatttttcttactattttatctccccctttgtcaacatcaaaaacaaatcatgaatagagaggataaagatgttaccacttgttgcaatgtatgagaatcaagtgataccaaaaggcattaaaacaatcattcaatattaatcaagcaaaaacaagtacaataacacatcaatcaaaca

SEQ ID NO: 304161 - DNA, 414 bp, Glycine max
  unsure (1)..(414): unsure at all n locations
tgacacattacctgctnttcacatctatacttttgtggaggataaagaagaagtaggtgtcctttatttcctanaatatgctcacactctctaaaagcttgttaagctnttttgcttacttttacttatgtcatttccttgtacaaatgctcaacgtgtagcatgcttttgatcaaaggttgtacttacactcaaaaaaacctttcttttcgttaaattattgaaattcaaatcttagagcatattcaaaaacaatataagaagagttaaccttaacattcaagctacataggaaatgggtctcacccattgaatcatccaaaaataaaacctataattgtgaaattcacaaatgctgccttatctattanggacaacgaaatgggtccgacccattgaatcacccagtttaac

SEQ ID NO: 304162 - DNA, 430 bp, Glycine max
  unsure (1)..(430): unsure at all n locations
agctntanaattcgaattaaaacgtttagaatctgctggtaatcgattaccatatatgtgtaatcgattacacagtgcaaattttgaattcaaattttaatagttgttgtaaattagttttggccactggtaatcgattacatcctctggtaattgattaccagagagtaaatctcttgaaaaagactttttagcttaaatttcttggccaaaccttttgctacttcaattggaattctcttcctacttaatataccctttctaagattctagagactgtcttgattatccatcttgaatatctttgatttctttgtcttgaataaagctttgtgaaacatgtaatcctttggcatcatcaaaacatcaggttgatcctttgtctacaaatcttgaacttattctcttgggctttttgtcatcatctttg

SEQ ID NO: 304163 - DNA, 438 bp, Glycine max
  unsure (1)..(438): unsure at all n locations
tgtccaattganataagctgaanagagcttattctaataatcttttccatcgagtttattgaaacaagttgttcaatagactgcaaaacctttttttttttgtctttattaggattgaataatgcaccaagtttattgttattgctgatgtgcatagatgttgacagggctgatatttggtcttttgggattacggcacttgagttggctcatggccatgcaccattttcaaaatatcctccaatgaaggtatttacatcccgtggttgttcagagacaatgtctagacacatgttaacattggaccgattgaagttcatgtgatataatttgtaataaaagaaaaagagagttcactttttatttcatgtataggttcttctaatgacaatgcagaatgcccctcctggacttgatgatcgagataaaaagttctct

SEQ ID NO: 304164 - DNA, 443 bp, Glycine max
  unsure (1)..(443): unsure at all n locations
agcttttcgcanagcttacggtaaaatctgtgtcctagccatggtagaagtctctacagaggccattgcctccctcatccagtattatgatcagccattgaggtgcttcacctttggggacttccaactatcacccatggtagaagaatttgaagagatcctaggatgtcctctagggggaaggagaccatacctcttctcagggttctatccctcattagctagaatttttaagagtccaaatcttggcgcaggaattagaccacagaaagcaagtaaaaaatggggtggttggaatatcgagaaagtatttggaggcaaaagtaagaatcttggcaggtaaaggcgaatgggccccgttcatagacattctcgcactgttgatcttcagaggagtcctctttcggaatgtggatcgggtggtggacttagcagcgatcgac

SEQ ID NO: 304165 - DNA, 376 bp, Glycine max
  unsure (1)..(376): unsure at all n locations
gaacaaaatcgccttaaatcatttcaaatatgcatgttaattatttcgcatcaacaagaatcaagccaaggctattgtgcaagcaatcaatggggcaaaacacaccatatgattataatgacggatggctcaaattctcacaaaggtaaaatcatcactttcacattgagctttcanaactatcatgacatgtagagaagaatcaatgatttcaagtcacaaaatgtcaagaacttttattttcaaaacaattacccatttcttgaacatatcctataattcaaagaataacatgcaaagtcgtacgcgcacacaaaattgacccaaaatattactctgataatccgacgaaactaacaacattaacaaattaaca

SEQ ID NO: 304166 - DNA, 446 bp, Glycine max
  unsure (1)..(446): unsure at all n locations
agcttattagtcggtctttnccatttatttgtttttatgcattgccattgttttttcattaactcttcttgtatctactttataatttaaagattgtgctaatcagtatctttaagacactgattaagaaattcagaatgaaaggttttaattaaaaattgacattaatgcatatatactatgatttccaacacactttcaacgtgaattttttttaaaaatattttaaattccttaattagtgtgcttaagattagaattgaaggggttttaaatgaaaaaataaacacccacttagtgtcaatcatattaatccttatatatcgataaaaaaaaatatattagctcctatataataaaacacttacatgatatatattcttggaaatgtatttctttagccatatcagtcttcattttaagaatcttgataattacgttgagtg

SEQ ID NO: 304167 - DNA, 366 bp, Glycine max
acgaacccggaatgggtgtagggaaagacaacggcggcatgactaacctgataaatgccaaaggaaatcgtgggaagtatggtctatgctataaacccactcacgcggatataaggagaagcatcaggggaagaaatagcggtgagcatagctctgtggatgaggcaagaaagtgaatgaagcccgccctgccacatatgtagatgctttatatgcgcgggtctggaatacgaaggtcgtgtggacgatacatactaagatgatgttccgagtacattgtatatgagacgaccatgccctcctgattccagctgagaaacagacgagtggaggaacgcctcggcatttacgcaacgagcataatgt

SEQ ID NO: 304168 - DNA, 362 bp, Glycine max
  unsure (1)..(362): unsure at all n locations
tccatcacgtggtggcttgcaaccagcttgagacagaataatctgatatgtattacaaacaaaaccatgagagacagggaaaggccacatgnaacctataccctattatgcttataatacgatcttaattatatcacaatgagactgatatgctagaggaggataaacagagacaaccaagatattcacaatattagcaaaccagggattgaggaaggacttggacatactctacataatgtacatatggccatgagggtaatcataccgagtggatgattacatacaggcatgcatacaccagctaaagtggaccgactgaggttatgtgaccactccgatcacagatatcaaatagactc

SEQ ID NO: 304169 - DNA, 442 bp, Glycine max
  unsure (1)..(442): unsure at all n locations
agcttcttgttnctggtaattagatgaaatatttcgtagcttgagtcgatatagatctctacgtttcagcggggtacggtactgtacggcttccccttctatccatgaagctgcctcagggatagtaagcctaaatttcccaaaaatatttatacagaacctcgattttctctttatgcagcatgcatttctatgggtatgatggcagatagctctcattttgcaggctttcgcatctattggagtgtctgataaaccttgatgcgttaatgcgtggcattagaaatatgaatggtggttgggtctgcgcctttgtatctagcatttacatcctggtattttcctttattttcctgagccaaatattgatccttgacttttgcgatgtgcaccgagttgagattacactcctaagacttgtgtactagcatctttccttcgc

SEQ ID NO: 304170 - DNA, 282 bp, Glycine max
actgtgtacatttaatctaatctttcccagactcagctacaattaaaccactgtacattaatcataatagtaacgcttgaggggagagtaatgttgcaatatggattctgctccattcctttctttactatcaaagcttcgcaccgatcatctcttttataatatatatcacaagcctttcgcgatatcagttatttatcttctttcaagatatcgctcgattaacaaaaccttatgacacgaacatatctgccaactaaacaaacgatactttctaaataa

SEQ ID NO: 304171 - DNA, 286 bp, Glycine max
ggtccaccgccttaacatgaccacctttgaagtagaatagaatcactcgacacaaaacaactacgtcggtctgatgtcctcatcgcacttgaggaacacgaacgaccatagggaaacacccttgtcgaccaccagcagagaaatactgtacaaagggcataaaggatatgacgacataaagtgggaacataacaaatcaaagccgtgtgatgcacattcgattaaaggatgccgtcccttgggacggacgtgcggtgtgctaataccttccccgtgcgcaaataca

SEQ ID NO: 304172 - DNA, 83 bp, Glycine max
acgagaagaaaaccaacaaaattaaagaacggagattgtgcacgtgacgcagaaaaaacacaggagacaagagggaaaagaga

SEQ ID NO: 304173 - DNA, 502 bp, Glycine max
  unsure (1)..(502): unsure at all n locations
cggacccccgttgatacgtcgagacctgggatctctaagacacctgaggcctgcgcgctgcaggtcttaggaaccatctgggttctggncattgtagacgtctccacagaggccatcgcctgcatcattcaactctacgatcagccgttgaggcgcttcatcttgggcgacttccaactatcacccatggtacatgactatgtcgagatcctatgacgtgcttcatggggattgatatcataccttgtctcacggatctatccctcattagctagaattttgaacagaccaaatcttggtgcacgatgtagaccacagatagcaagcatgaaatgctgcggtgggtatatcgataacgtactagcgggcataactttaaatcttgcccggcaaacgctgactggaccccgctcacttacatgatcgcactgtcgatcttcagaagagtcccttctacgaatgtgcccgtgttggtgaactcaccatcgagcaatccttatcg

SEQ ID NO: 304174 - DNA, 323 bp, Glycine max
agcttcgaagtcaacagactacttatgaaccttcacagtttcaccatttaccaacaatacattattaattgacaagactcaagcgtgtatttactgtgctttaaacggagcttcttctctactccatacaactattattcattaacgtataagacaagactgcatactaatcatccaagtctacatacatcataatcccaagttcaactagacaacctaatccatcacccttctaaaaagaatggcaattccacaatagcattattggattcaaccatccaatagtacatcacccattcactattccttgctgacaataccat

SEQ ID NO: 304175 - DNA, 440 bp, Glycine max
  unsure (1)..(440): unsure at all n locations
ntaagggcctttcagtgcctataaaatcaagcagaactactatcattgatctcagtattaattcagattgctcactgcctaattgggatcgacaagcttccttcaaatgaatctatgaatgctcatgttactcttgcttgcattaacacaattccttgtatcatgtgaaggcttcaaagcaagaactgcttataactatgtatgattatactttatgctattggatgttattttggttgggaattgagcattaatgtgacatacagtagttaattccttgatacattaggggaccgtttgtttatatntatttctattttgaaaacaacgttgggtctgcacatcggggtcccctaacatgcatcaagccctaactggatgattggttgtatgctctacagctttatcagactncgtttcaaactagttcttttttcatg

SEQ ID NO: 304176 - DNA, 279 bp, Glycine max
aattattttgatgtgaaacctcgttctactccttatgactcatccataatactaaagaagactttgcgttgctgaatttcttcacatatatattcgcaaagcatcggctctttgttgcatttgacaaacttctctacgcctgacattgcatatgcagttggtaaattacgaaggtgaactaataactctgatcattctcattggattgcattacaaagagtatttagatacttaaaaggaaccatcaattatggcattcattatacatgtgatcctgca

SEQ ID NO: 304177 - DNA, 439 bp, Glycine max
  unsure (1)..(439): unsure at all n locations
tcttttggactttgaacaggcaactaactcctctttcttaatcatgctatgtgctcgcgactggtccctttctttccttcgcaacttgagttcactattgctaccccatatatctccgcgaaatttgatccggccatactcttccttgcgagccctcttggtctctcgtacaagggctcttgcggtaattgcattctcttcccgtaacccggcacactccttccgaacgtgtgtaacagccaactcgaacttctccttggcgagttctgcctttcctaactcgcttttgagagcttggacttgctcgtcctcttacggggctgccaaattcccttcgctgacgactcttatcttggcgagccaatctaaacctcgtatgctaacttgtcaccattcatggtacccaccnatgatgccattacgaatgcctctatactct

SEQ ID NO: 304178 - DNA, 194 bp, Glycine max
ggtgctattgcgcatcaccaatctcgaccaaactccacccaacccgggcatagtccgacagtgagaacctgtgatgtacctatacaggccatctcctggcagtcaacttatgaaaggaactgagaccacaaagcaaggaagcttgtggtggctggccagctctgaaacttgattgatatgtgagatatgggctc

SEQ ID NO: 304179 - DNA, 410 bp, Glycine max
  unsure (1)..(410): unsure at all n locations
tatctgtgttcatccgatccncaagccactccttagatatatttaatccagttagtttccttatatagtatatatgaaattggcctttgtttccttttcatatattgtaaaagatacaccatatttaactgtgttagctcttcattctctttggccaattaatgtcttaaatcaatgtgtgacaaacaatatatagctaactataattaacggttacaaactatattggaagtaacttttttgtatcagcaaaatagatatattgatgcatggtggtacaagggtaccacaattccatgattaaatagcaactaaccaaaaccagaattacaatatgcagtaagagtcattaagtgccactgatatgatccgacaaaaagttccaattattttcaatatgtaatggataa

SEQ ID NO: 304180 - DNA, 432 bp, Glycine max
agcttagaaagacattatttcattcataacattatgtaaactagagagccatccacaatatgcgaataaaacatatatgaataattaaaggacatagaacacaataccgaatgtaagtacataccactagccatatatcattgaaggaattaagggtaagacacataatcataaacagccaagagcaggtctatataatcataatgttcaggcatactaagcaagtgttaaaagaaatactacgtgttcaaatgtcataaaaacatatgcaaatacaaggcttacgaacaaatataattataatctaaatatattatccgagaatcaaaacttaattctaagtaacaaaaattagatatgaacacatacatggtaacttattacttatctcgattaatgaaccactagaatgtaagtatcgaataacaatca

SEQ ID NO: 304181 - DNA, 431 bp, Glycine max
agcttataaagataaatgatgacatgattttttcccaatcacactatgttgaaaagctgttgaagaagtttaattattttgatgtgaaacctgtttctactccttatgactcatccatcaagctaaagaaaaatttgggtaaaggaatttcttcacataaatattctcaaattatcggttctttgttgcatttgacaaacttctctaggcctgacattgcatatgcagttggtagattaggaaggtgtactaataatcctgatcattctcattggattgcattagaaagagtttttagatacttaaaaggaaccatcaattatggcattcattatacatgttttcctgcagtaattgaggggtttagtgatgcaaattggatttctgattctgatgaaacaaaatcaacaagtggttatgtttttacttta

SEQ ID NO: 304182 - DNA, 437 bp, Glycine max
  unsure (1)..(437): unsure at all n locations
ntaatcaccatccatgtatgaattaaaaaaaatctattaaactcattaaataaccagcaaagtatagttctttgttggtgaaatgatccggaagcaaaacctcaaatctgattggtcagtatctactttaattgttgatgtaagcaagttcacagtgtgatgagcaacaaatttctcatcatgtactccaccatgatgatgagaagacagatcgacttaaaagtccagagctcagagctattcctctggccagaatgttgactactagacccctacacatgataaataaccacaaaaaatgtttttttatataaatgtttgccaattaatcaccctcaatgtatcacttgataaatgttttttataaatggcatgcacttccggaaaccaaaaaatgagtgtgtaaagacaaagctgattccaaacctggataatat

SEQ ID NO: 304183 - DNA, 447 bp, Glycine max
  unsure (1)..(447): unsure at all n locations
agcttaagctctntcaactgcacaagcctcttgttatttgaagagtatccttgtggaaccttcacccaacgaagacactgacaaaaacttatcttctccttcttggacaaagtatggcaggctgngggcaagtaaattttcttcccatcagaccttggatgcaactgtgatcgtatacccatatcagctagatcttgacgggtattcaagccatccttcgtcttgccttgaatgttaaggagcatcccaatcacactgtcacaaacatttttctccacatgcataacatcaatacaatgtctaacgtcaagatcacaccagtacgaaagatcaaagaaaatggacctcttcttccatatgcaactctgactnttatccttcttttgggtcttcccaaatacagtattcaggtgttgaacccattgatatacctgctcaccagtcaac

SEQ ID NO: 304184 - DNA, 399 bp, Glycine max
atgaccctgcaatatgtcttgcacccatgcatggcctggttgttggctgggtatgcacaactctttacataaatttttttattgcatattcacccataaacacagccacatatgatgcttgcttcataagttcatcattttcattggtattcgattcaaaattttcaaccaagtcattcatttttgacctgtatagaaacaatattacaaaatacaacatatatcaagatacacatgataaaacataagttcattaccaaccataatatggctcggtacaagccaaataagaaacataaccaaatttgataacaaaacataatatgagttcaatagaacatgactcataccaccataagcaaacatctaagcactagtacataatagtaagccaatgca

SEQ ID NO: 304185 - DNA, 449 bp, Glycine max
agctgttcaaatgggtaaaaggctcacattctctttcttctacatcatattcaaacttgtccaaataaataataaagtcatctagacacaaagaaggtcatctaagtttcatacaattaatatagaacctatatcctaatgccacatcctatcagagcgtggtgtccccgtgtcctctagcatgaggttcttcatagtcatccacctattcatctgctcccccgaacacaaagttcaagatcatcacaggattcaaacacaaacaacaaaccgagagtgagttatcacatttctaactactagagagaaacaacacaacatatagtagccaaatacaatttacttagcatatctcacattatttcatcactctgtcattcatcaatcacacttgtcatccatcaatcacacctttcaatcatcaatcacaatacacaggaatcacacac

SEQ ID NO: 304186 - DNA, 444 bp, Glycine max
  unsure (1)..(444): unsure at all n locations
ntggttaagtcatatgtctaataattgaagactttagcgttctctttgaatttaaaataaactatgataaaagtgactagcaaggtgaagatgacacatgcgttatagttntatttaaagcatatttctagacaacattgaacttcaactaactaagggttgaagttctagtggcttcattctacaacgtttcacttagcttttctagcgaacacacctttataggtagctctttccaagacaattgcaagctaacggtaattgaaattaagacaatattctaacaaaaataattcttaaaagntaaacactattctcgntcaaaaataacttttaaaaatactattatctagtaatagattgtaaacacattgttatttaagacgaggattcaatgttatgatataagagagatagagtttcctatatatacttttgactttt

SEQ ID NO: 304187 - DNA, 444 bp, Glycine max
agctcggtgcattgagaaggatctctgtcgagttggaaggacttcacttttttagtgggtctcactctcgactttgcttttatcaaatcgagttcagtttctcccaagttactattgagggaggcgcatgctaccgattgtactttgggctttgctacccttttccctttagcaatcttgaggcttacaatataacattccattccactcatttgatcaactctgatagtgataattttcccatcctcacttgggaacttcatcgctagatgcggagttgaaatgatggcccctaactcgttatgtgaaggacatcttatcaatatattggaaaaagtcaaggcgtcgactaaaaagtacttgatcatgatggcctctgacccctcttcatctttgaaagtagttagcaagtgcacatatcctattgtgctcattgtctctact

SEQ ID NO: 304188 - DNA, 444 bp, Glycine max
tatgacctgtacgatacacaagttccctaagctctgagttcttatgagtgaaagaggtttatgtatgtttgaccaaattatcacacaaaattagatgactcgtgatgttagtatctgtcgtaagttgtattgtttagagacattgtattttctaatgatatggagatattttaaatagttttgacacgtgccacaatgtacatgattgtcttgtctttgacatatgtcgcaaccctagataacattgcatacatcgagggtggctctttactacagaaatgtcttttgggggtgctgccttgattggtgccccctatggatgatgactattgaagcagctcttggagaatgaaagacaccattaatgatgaatttcttctacatacgtacttagatgtgaagagttgtattgatgagatgttactgttggctaggggaaatgaa

SEQ ID NO: 304189 - DNA, 397 bp, Glycine max
agcttaacaagtggaatcagaggaaagtctctatggcaggcttaattactttaattaattctgttctgacagccttgcctttattttatctgtctttcttcaaagctccttcagcagcgttagtgaggctgacttcaatccaaaggaattttttgtggggaggaggtgctgaagggaaaaagatcgcttggatggcttgcgatcatatatgtactcctagaaatcaaggaggtttgggtatcaaagctatcaaggatcttaatagagcccttcttattaaatggaagtggctgatgtttcaccaatcagaccaattgtggtgcagaatcctcatctcacaatacacacgatggagagggctggaagagaattcccacaggcagtctcattccttctg

SEQ ID NO: 304190 - DNA, 591 bp, Glycine max
  unsure (1)..(591): unsure at all n locations
cgcgcactctcaacnacaccacacacgccgtcaagtacgaactaatagactatgcgacacaacaataaactatacacaggaaaaaaaggagggntcctgtagacctcgctanaacgncacactatataatacacacgcttcagcagcacgattcagcacctacgagcagatgctttcacggtctttactacgagcacacgcgcatagagacgtgatcctaccttcgacccaaatgaaccacaactacactacctcacaaagcctccgacctgacgaacgaactaactcactaacacggaccatggatcaaagcagaacatgccacgcaccgcgtcctcagtacaataaaacaaggagaccacaaccatcggacgacaacacaaaaccaacaatcggacaatcaaaaacaccgggctaagaccctgacaacgcggaacgacaagcgccacaataagccttgcaataaaaaagacatacagcgccgcacacggaagaccaatacatgcagcaatgaaaaggcgaaaagaaccgaacgatgacgccactcccaaccttacccatctctataacggcgcacgtgcgactcacacc

SEQ ID NO: 304191 - DNA, 348 bp, Glycine max
agcttgctctaaatatttgtcatggttcacaatatgtacttatgaccgctgaactcctttgtagatgataaagcacgacacgaagggtccattgtaaaaggataccttatgcaaaaaatcttgacatattgtttaacatatctagatgaaaatgaaactacatggaatcgacctgctcatgtagatgatgaaccaattaatggtctacaacatggctaacaagtagttgacttatttcctctagttggaaaaccaattgacgactcttcatattacaccctcacacccaaagaaaagttacaagctcatagacatgtgttaacaaatcgtcctttactcgattcctat

SEQ ID NO: 304192 - DNA, 455 bp, Glycine max
  unsure (1)..(455): unsure at all n locations
tgtataactcttaaagataaagagtccaagttgtgtcttgatatttatactagtgttaaggaaagagctattcttctcaagaactttcaagagttggaaaatagacttaaagatcttcaaaaggatcagtaggagctgaatgaacttcatgactatcaaaaagaagaaagatatgatctatggtgagaatgcacacaagcacacaaagattatgaaaacctcaaaataagtaaaataatctttaggtggaatgtgaagaacacaagagatctgtgaaattcttgaatgataaacttttgaagaatcaacaatttgaaggtcaacctcaagatgttgtcaaacttcatgaggaaattagaaccttanaaactacattagccaaactttttaatggaaccgataatcttaacaaactgttaggaaactgtagaagttcctcagaccaatttggaaat

SEQ ID NO: 304193 - DNA, 285 bp, Glycine max
gcgcctatgacagtggcaagccctgaacgaatgattcttgcctatgttgtggcgggctagtcgcacagaactacctcgtgtcaactatactcagagatgcaatctgacaccttatgacacatatcaggtatatattgtcatgactttcaagacatacttactgtggcctcgagagattcaggactgaccattgcccatagtatgaacacatctcgcctactgcattacgtccatacgaaggctccagtcacgagttctctgctaccattgcaccacgacacagtg

SEQ ID NO: 304194 - DNA, 437 bp, Glycine max
  unsure (1)..(437): unsure at all n locations
agctntctgaagttntctagttttccaaaccttgaaaacttgtgctattcatcttttcattctcttctcccttagccaaaaagaattcgccaaggactaaccacctgaattctttctgcgtctctcttctcgcttttccaaaagatcaaagaactaaccacctaaattcttttgcgtctgccttctcccttatcaatgaattcaaaacgacacagactgagaattcttttgattcttccctttccctaatacaaaagtgtacaaagaactaaccgcctgagaattcttttgtatgcacatttacaaagtatgagaggtttaaccggctgagatctttgtcttaacacattggagggtacatcctttgtggtacaagtagagggtacatctactagcgtttgactgacaacatgagagggtacatctcttgtggatca

SEQ ID NO: 304195 - DNA, 445 bp, Glycine max
tgcagaattggtcttcgccagtgaaaggatcgatgtgtgttctgattaaaacgcaaatttgatcatcctactaggacgactgagaaaactggggcaaataaagagggtgaggataatggagaaacccatgctgtgactgccattcctgtacgaccaagtttcccaccaacccaacaatatctttactcagccaataacaaaccttctccttacccaccgcccaggtatccacataggccatccctaaatctaccacaaagtctgtctaccgcacttccaatgacgaacaccacctttagcacaaaccaaaaacaccaaccaagaaatgaattttgcagcgagaaagcctgtagaattcaccccaattccagtgtcctatgctgacttgctcccatatctacttgataattcaatggtagccataaccctagccaaggttcatcaa

SEQ ID NO: 304196 - DNA, 347 bp, Glycine max
agcgtttacagctgtacaaaattattatatcttcacatatctcaaggcacaacgattacaatgagattaacagatacatccctatatgtctaacaaattactgttgaagtaacaagttgctggacgatgctgtgtctttgcactgtacgcggattatagctatggagaaagatttttctatgccctataaccagctgcctaccaacataatacatggtatctgtaattatgacacaaaaacctgtgggagaagctgttgtacttgccgatgcgaatcgcggatcgagcagtctgttacacagactgacttcttatatacagtagcacattcatacctatagtgtatc

SEQ ID NO: 304197 - DNA, 420 bp, Glycine max
  unsure (1)..(420): unsure at all n locations
ttgattgtccatatgcaagccaattgtggtagctacactcatttgaaacaaacttcatgaattatacaaaacacttatcctttgcatagatactacatgaatcacgtttgcatgcttgattctaaatgcaacaaggatttataaaactgcaaaacctatattttagctaggttcatcacatttatcagcatgttttttttagattttaatctgacacattctattagtgatgggcaacacaaatccatacatagtcatgtgacacgtaatgccaaatctggacaagataaataattttcacaagttaatattaacgataatatttatcttatncatggtcaagcaaatattagagctgaattgctaatagtaagacaaatgaagtctgtatcatacataggcttcaatggataaattcct

SEQ ID NO: 304198 - DNA, 233 bp, Glycine max
atggcgtactcatcacatgtggcactatgtggcagacgggcgatggcgcacaacatgattgttcacatacacgaacagcgcataatcccaacattccctgttgcccacctctcaactgagctgatgtactactacggagaccatatcctacgatctctcaacaccgggaccctatcaatcatttcaagcttcctcatcatgcaaatgcaacatcattcaaacagaacatacta

SEQ ID NO: 304199 - DNA, 440 bp, Glycine max
gtaatatgccctcttcccacggcggagatttcttcttctgttattgcgagatagctgttggcagtgatattattgaccaaccctatgaaaccttctaccgagatgtcttgggccacgtgggcctcgttcaaaacttttattaccagagcccgatgaggctcggagctcatgagtaactccaacagcgagaccctggccgaggttttgttgagctgctcgataaccttgaattggctctgctgaattatacggaggaattcgctggcttcctctagcgacacctcctttataccatcctttttctccggaagacatttcgccggaatatctttattcgaagcgaggggtatttcatcatcttgttcctccaccattttgctatccacttgacgttcgcgggttggactggtaggtccggaggtgcaaacacacgagcgcta

SEQ ID NO: 304200 - DNA, 419 bp, Glycine max
acattttctgcttatattgattatcacagagtggtacctggagatatcgagccggctgttatgaaaccttgcggacttccagtgttgtgctattgccaaaaaccatcttgacaattcgaccacccgggcattatggacttgacaacctgtgatgtacctaagcatgctatctactggcagtcaacagattaatagaacttagaccacacggcatggatgcttgagtgggctggccatctgtgaacttagatagacatgtgggttatggcctgtggtaatctattaccatcgcgggcgtatcgacaacaaggctcagacaggagtaccggacgctaataatggctctggtaattgataccaaccggtgtaaaccactgctcggcctgaacactagtcacctatctagggaacgctctgct

SEQ ID NO: 304201 - DNA, 584 bp, Glycine max
  unsure (1)..(584): unsure at all n locations
cctcctaccctantcccacncacgacacgccctcnagactcgatataaagtacaaagcacaancctacacgacaaaaaccgaaagaaattgttgactgcaatcnctcgncgnngcgcgatanaatacacaagcttcgcccgtgtcgcgctcacgaccacgggcaaaccgtacttcttttattattcacccaaagagtgcgctccggatgcgcgttacacaagatacatgatcaggactgctgctctgacgagtccataaccaaccacatatcaacgcaccgttgccatagccaaacacgggtcaccactaggcccgttgcggagcaacgctattgaaactacacctgcgactcacatgccatcaacactacactctctaattcttacgaggactcgctgcacgaaatattatgcgataacaggactatacacattgctcagaaggcctagcccctctcatgcttaaaggaataaactgaagaatatacgcttacgaaccgcgtagagactatcattcaactgaggattttcctcagcccaccacaatgatcaggtctggactatcctacatataacccgctccc

SEQ ID NO: 304202 - DNA, 432 bp, Glycine max
agcttgcatgatttacattctccctctttcttattagaattctcaattcttcttgacatcatcaaaatcttcatgatttacattctccccttttttgatgacgacaaccacctgtaggttaggagcaacaacaaagaaaaaaatatctattcgcatatagtttactcccccttggttttgcaatgattgcttatatgagacagttgaagatttcatattcttcttgtgtaaacaaattgtctcataaacaatagataatttttcttacttgatgaactaccatctattgaaactctatctactgtggatgggatataaggccctatttcttatgtaaacaaattgtctcataaacaatagataatcattcttactatcttatcttttatctttctctgccgctttgtcaacatcaaacacacatcatgaata

SEQ ID NO: 304203 - DNA, 409 bp, Glycine max
  unsure (1)..(409): unsure at all n locations
tgatctcctcgaggaaagactgagagccgtggaatgttttgttgactatccgttcgcagacatgacggatctttgcttagtacccgacgttgctatccncccgaagttcatagggccgaacttcgacaagtatacacggacgacttgtcccataaaccatctcaagatgtactgtcgcaagatgggcgcacactctaaggatgagaagctattaatacacttctctcaagatagcttggccggagccgcggtagtgtggtacactaatttggaagcttcccgtattcgtacttggaaggatctgattactgccttgctaaggcaatatcagtacaattccgatatggctcccgaccgcactcaactgcagaatatgttcaagaaagagggcgaaacctttacagaatat

SEQ ID NO: 304204 - DNA, 422 bp, Glycine max
agcttaactcctgctatgatcaactacctattatctcatatcaaagttaacgtttatctttgattgatcaactaatgcaaaaatcaaaattatttattttaaaaaaataaaacaattaaaatgtcttgatttagaaatagggaaaccaaaatcgatgatataaaattataggggacctaaaatataatttaactttcttttttcatgaaaatcacttttattttaaattattaatttaaatgtgaccgagtccatttttttttattaaaaacatgtttgttcgaatatttgaaaggaaaaaaactttaaaagaagtcacatgccttattattttaagagattactttgtgtagcctttatgattattttgagaaataaaagttgaaattaatattaatttctaagtaattctcgttataatt

SEQ ID NO: 304205 - DNA, 445 bp, Glycine max
  unsure (1)..(445): unsure at all n locations
cgcttgagctggtatctgngttaaaaaanaattcgcatttttctttgttggagcaattgggaagaatgagcagtggcagatggaggcagctagatacctgaactgtggagttctgtcctttccttttgcatacttgggtatccccattggggataatccaagatgtagtgatctttgggatcctatagtcagaaaattcgagagaaaattagcttcttggaaacaccaacatatttcatttggggggagagtgacactcataaatgcagccctagcagcaatccctatctactttttttcctttattagggtaccttcaagagtaatatccagattggaagcaattcagaggcaatctctatggngaggaggtatggatcagagaaagattgcttgggttaattggaaaacagtctacaatccaaaggatatatgaggacttggc

SEQ ID NO: 304206 - DNA, 448 bp, Glycine max
  unsure (1)..(448): unsure at all n locations
agcttgcttctacagannagaaatctcaaggatcgcaggtcgcttggggactggatgtaggcacgggttgttgccgaaccaatataaaactcttgtgtttgttttcttcttccatacactctttaatttccgctgtgcattttaattatcgctattacttttggttaagttttgtttttctattctttattttctcaactttgtagtaaaagcctaattgaatttagtaacattaagaaggatagatttttaattagtaaaggtctattaataattaattcaacctccccccccccctccttcttaattattctgaggccacttgttgcaacaagtggtatcagagcaggtatcttgtagaaagtttaaccacttcaagattcatggcctcttcaaattctttgtttcctgaaggaaattccatccataggccacctatcttcaatgg

SEQ ID NO: 304207 - DNA, 402 bp, Glycine max
  unsure (1)..(402): unsure at all n locations
atggaagtactaagtatttattacctatacttaacagaaaatacttataacacaacaaaataaccataaattggaagagtttgatacaatttacacaagttttatacacaaaagttagtcgtgttcaccgactaacaccatgcagcgcaaagggaagcatctcgtgccaatccttgtatgacacggtcatcttctgaactatatcttcttgatattnttattagcggcctcaactgcctcattcatcttaagccagtaaggcatggaattatggtgttagatnttgaaatcctcacacatctccttcatcatcttgttgttcagattggtggcattgaaggtgataattttccttagcaacccatatcggcaaattatctcccttntgatgaaactaatcac

SEQ ID NO: 304208 - DNA, 438 bp, Glycine max
agctgctaaaagtataggaagcaacattagtattgcactattccattcccataaaaataggcgttgttcacactgtctaagcataacaatagcctgcccattacttctagcacccctatattaaaattcctatgctatccttctttatttttgaatagtcattccgcacatgagtacgtattttgaagtatctattttggaatatgacttcaatattctgcaataagtcttcgaattacctatacactttcggaatacctattatagaatatgactttcatgtttcaaaataattattctaaaaataggtttccaaaatatatacacacttcccaacatagttattctagacatatgaaaatcatatttccatactacggtggaaaattcgaagaacgatctcaagtgaaagcggctatggattcataccaataacat

SEQ ID NO: 304209 - DNA, 302 bp, Glycine max
tatgttaatcaattagactttatccgtatccttgtggatgtataccttgaatactgccatgtagttgttgaacatggtttctagtaatgtaattccaaagacacctcttgagctgtagacaaataggatacctactataatgcacctgcatgtatggggttgccaggcagatataacgatttataatccgcaagaaagaaaattggatgcaagaacaatcagtggatatttcattggttatccagaaaagttaaaagggtgtatgttctattgtactactcatagatgagaactgacaaact

SEQ ID NO: 304210 - DNA, 443 bp, Glycine max
agctctcaaccgttcttcgacgttcttcattctttcttcatcgttcttctatcttcaacgggtaagtacctcgaaccaagcttttcgattcattctatgtacccgtagtggtccacattgtgtttcgtgcatttttattctcgttttgtttactttttataccccctgttgacgtgcttaagccattttacttaagtcatttctcgcttaacttaaaaataaaataaatttccaccgaacgtttgaattgtattatccattaacttcggttaaaataaattccgaccgttcggtcgtgccgtaaccacgttggaaatcaaaaagaggtaaaaaataatataataatcaaaaagacatcttttagtaaaataaagcggaaaatcaatcggacgttttctctttgggatttctcattcttaatcgaatcgattaataactaaagt

SEQ ID NO: 304211 - DNA, 452 bp, Glycine max
  unsure (1)..(452): unsure at all n locations
tctctctctaactctcactctcacttagagaaggtgggaactctattaggcacgcatgctttgcattggtgaaaacggataacaaaggattacttctttgtgtattacccatgtaaaaaagtcaactttttgatgatacattcatccaaaatttcattgacaatttcctccaactacgtcagcaacaaacataggaaattttttgttgacaaatccgtccacagatgccacgcagaacattccatttgctttgacagagatatttaatgtttggactaaattgtcgcactttccttaaatccaaggacaatttttttttttatcttttcagtactaaagtgttaactcattacaaattcagggattgaagtgactaatttatacttaattntgtaggtcgtatactttttacttataatggttcaaatcctctaatactcaatgtttaacaa

SEQ ID NO: 304212 - DNA, 434 bp, Glycine max
agctgtgccgtgatggtgcatttgaaattggtgattgggtttatgttcgccttcgtccctaccgccagacgtccatagcgtcgacttacaccaagctttccaaaagattttatggcccattccaggtactggatcacataggcccagtggcttacaagcttcagctgccactttcttcccgcatacatccagctttccatgtatccctcttgaaaccgcatcttgggccatcctcgactacaactgccacattgccatctacagggaacaaccaccaactcttggtctctcctttatccattctggattggaagtgggaccattcatcttccccacctaacaagaaagtccttgtttagtgggatggcttagcatcgaaggatacttcatgggaactatgggacaagctgcgtgttgcctatgaccttgaggac

SEQ ID NO: 304213 - DNA, 451 bp, Glycine max
  unsure (1)..(451): unsure at all n locations
ntgatgaaagtgcagtctgaaggtagccaaatacgccttctatgcttaacgaagttgggcgttaacacatgatcagggtagtctgctgggttcgcatgaaccttctcccttaaagtgatgaagtcattatgcgactgcaactccttatagagatcttcaagaaacacaaaatgaggcattgagaggatgaaacatgaggtactaggtaattctgaacatcgcgataacgcgtctgcaaccatattagttttgcctattcgatattgtatagagtaatcaaatcccaacaatcgtgccaaatatcagtgctgttccagcgtttgaatggcctggctcatcaattctttcaagcttctatgatcagtcaggattataaagtggtgccccataaggtattgcctccatttcttaacagcagtggtaatcgcagtgagttcacgaacataagtgg

SEQ ID NO: 304214 - DNA, 450 bp, Glycine max
  unsure (1)..(450): unsure at all n locations
tgttagactgtttcatacaagatatggaaacaaacaaatattcttctatatcgcangtctcccagaacaggtcagaactttgaaacatatatgaatatgatgatgactatgaaactgatattgattccaataaagcatccatgtactctttaagtttcaattttgtaattgcaccttccattctgctttctggaacttcctgcccgttcttgaagagtattaatgtcggtagtccataaactttatactcttaaattacttgcgggttgacatcatgatcaatctttacaaccgttaatctgtcttcatattcctgcaagttattattataaaaaataatcatggtccaggggagacaaattaagatcctaaagatcacttgacaatagttcttaggaaaatcatactatttgtttcacaccatgctatccccaccatatatagcctata

SEQ ID NO: 304215 - DNA, 282 bp, Glycine max
ctcattgagttcttatggctatagagaacgagcaaagatccgcatggtgatcggcgaaccaacatagaccactgactcttgcaacatgggcagatgcacatctttagattcatggcgagcatgagttactatggtgaccactgcatcaagagttccctcaagctatttattatccgatcatgaagatgaaacgagggccacctgatggactcctcgatagaaaagagcatcatttcttgcactgaagtgtagggagttggaagccatcctctcaatcaaatt

SEQ ID NO: 304216 - DNA, 408 bp, Glycine max
  unsure (1)..(408): unsure at all n locations
tcaagctgacagagacttcagaaagatgtataatctcattcttatctgngagctctcattgataatttgtacatctattcaagcttacttacttcacaatgtctttgaacatgctgtgttttttttaccatatacccgactcgaaatatcctgctaaatgtatgtctttatgaaaattagtccatgcgataattagaaggattaagccatctatagcttaagtgccacgttctaatgccaaagtattatttggagacaatatttgtattcatatgaacttgttacccttcttaggtccttctctccttgaatgccattgtcatggccaccttggctgactctgtacactatggctgacttatatatatcatcaaaccacttaaggcacaagcacatgttttatctcac

SEQ ID NO: 304217 - DNA, 494 bp, Glycine max
  unsure (1)..(494): unsure at all n locations
gcacaacgtttgaccgttgaacctttganacattcgagatccttagaggcacctgaagcatgcagccttgcagccagagcctcttgaatatgtatcacgtttgtcaaataagccttacgtttcacagctaggacgctcctgcgattagatcgacacaaaaagagactccatactctcgctcgagaaattattccatttgcgagaggtcatttcatggactaagctccgagcgtgatttgatgcattgcttttacctgttggtcgcgatttttattaacacggaggagaaagtatgaacaacactgatctattaatttcaagattatcacattgaacatatacaccctgtcatcggagtttccatactgcataaaagagatgacatcgcgcgttctaaaccactacagaatgattcacaccctctcgtgcacccgatctcccaaggtagcaactttgagatgtgctgaggagacgcctttagaaagtgtccccta

SEQ ID NO: 304218 - DNA, 365 bp, Glycine max
  unsure (1)..(365): unsure at all n locations
tctcgatatgttatgcgtctgaatcggacatgcgagtgtggttttgtgatcatnttaatatcccgagagcttccgttgttcaatttctagcatctcgatacgctatgtgcctgaatcgggcatgcgagtgaaaagttatgaccatgtgaatttctcgagagcttacgtagttaaatttctagcggcatgatacactatgcgcgtgaatctgacatgcgagtgaaaagttaagagcattttaatttctagagagactgcgatggtgaaagtcgagcgacatgatgtgtcatgtgcctgaatcggacatgcgcataatacgttatgaccatatgaatctctccggagcatctgtcgtgcaattacta

SEQ ID NO: 304219 - DNA, 336 bp, Glycine max
agcttgtcaggcaatactggcttgctggcctttgtgtgatgtcaacgacaccaaaggacgaggcatgcagcctgctatgagaagcctatggaactcaagtgctacacagtcgaaagcagtgctaagaaagcctccatcagggcgagcactatactccttgacctgcagctcatgccatattcacaaagacatcttcacattcaacaggtaaagctcattggtgaccgcggtgcgctggaagagactcaaaccgtacctcaaccaaacaactgttaacccgcaactatcagggagaagcttcggtgcttgctcaagctacgttgcgcctgacacata

SEQ ID NO: 304220 - DNA, 424 bp, Glycine max
tgatttcttggcctgcttgtgctcctttttcggtgttctgtttatttcagtgcctttaggccttggaatagcggtaagataggaattccttaatctgcttcctgccattagaaacctaaaattcattgtatgctaatactatgtgtttaatattactgacttcgccaaaatcttcaggtggcaatatcagtcttcaagatcttgcttcatgtctctaggccaaacacactggttttggggaatataccagggacgccaatattccacaacctataccaatatagagaagctttgaggatcccttcatttatcattttggctgttgagtctcccatctactttgctaattcaacgtacctacaagaaaggttagataaagcgacttgtagattggcgatttgtgaatgcttactacatttcaaat

SEQ ID NO: 304221 - DNA, 439 bp, Glycine max
  unsure (1)..(439): unsure at all n locations
agctntgatggtgtcgagaagatatcacatgtttgtcattatcaaaaaaggagagaatgtgaatgtatgtatacatgattctgatgacgtcaaaagaagaatcaaacaaggctcattttgcttcaagattaatacaagattgtttcaataaacaaagccttgattcaagatttcttcaagatcaagccttgcctcaaaatgaaaagatttcaagtcatccaaggcacatgtaatcgattaccaaggcacatgaaagtgtgcaatcgactacacatcatatgtaaggcgccatacctatactggagtgatcgattatacaggagtgatcgattacacattaggtcctaaggcaatgctctcactacaatctacccaacatagaggtgtcctacatcttctaccatacaatgcctcgtaaggcgccatacctatactggag

SEQ ID NO: 304222 - DNA, 449 bp, Glycine max
taaaggagtactcatagctggtgtatttacccccaaggtctatactctaaagagtctgtcagggcctttctcttctaatttaggaccaatccaaaaaacattttaacacatagactctatctatgaactatacaaaatacacaaatcttctattgttctcaaaataattttaactcatcgtgcctcaaagtgatcaactttgttgggttaccatagtggatcccatcacaatactcgttgcacattaactcgtcgcccttaaagggtcttacaatccattgattgtatgattcatagctcacaactcaatgcacacaacatctcaatacacatgtgatctcacaatttaacacatagtcaacttgtcacttacacacaattcatcacactttcataatcctaatacatcatgttatcaagcctcatgcatcatatacatatcacacatt

SEQ ID NO: 304223 - DNA, 285 bp, Glycine max
agctcctaacgcggtttcagcgattttgaattattggatcagccatataacattctttaagcgctgagccatcggatatttctggctttactatgttacattttctgcaccatcaacatcaatatgaaacagtattactatctgccgacattgtcacatggactttttagattacactgatagcatgccactttttaagtttatactgacgctacctgagattgtatcactgttgtggtacactaccacgattgcgtgaatcgcatctaccactcatcatttaaa

SEQ ID NO: 304224 - DNA, 427 bp, Glycine max
  unsure (1)..(427): unsure at all n locations
cgaatacaatgaaactntctaacttagcaaagcttatattctctcaattcgcccaagtttctttcgtccagttaaactgatagctttaaaacactttgttcatttttgtctcagattattctcttgtaattcgaaaatcttaacacaaacatcttcaagctttatatagactttagagctttgatccgttgagagatatcaagtagccattgtctaatagcttgagcattttacataaggccattactatacagagaaagtgtgggaaccacaaacactttttgtagcatatatttagagaagtacaacctgctagtgtcatcttgtgctcagagctgactttcagtgcacaaatcaaatgtaatgttaacaacatatgacaaanataattaagaatgtcaagacangatcattaaatcttcctttt

SEQ ID NO: 304225 - DNA, 432 bp, Glycine max
  unsure (1)..(432): unsure at all n locations
agcttatagcctttgtgaatctgaggcacatctttgaaatgatacataactctcatgtaaaggatcctcattcgattatatataactaaaaggaactcttcactctcacttgatatatttcttccatttgcgagaggtcatttttgggactaagcttgcagtgttttttcttgctctccttttacctgttgttgcagatttttataaacatggaagagtaagtatgaaatagactgtcctattattttcaagttaattacttcttacatatataccatgtcaatgtacttccactactgcaaaaatgaaatacaacgacggttcttaagcacattcaaagatgattcanaaccatctttgaagccaacatcgtcgaaagtcaagactttngaagatggttcctaacaaacctccttagaaaaatgtatcatt

SEQ ID NO: 304226 - DNA, 437 bp, Glycine max
  unsure (1)..(437): unsure at all n locations
tgctccacccggatcacctctcaagtaaactaatgggggggatatatagagatgaataattgaanaataataagcactagttattggggtgcacagtaatttccattcatttcatgtatcattcaatacctaattcacacagtaaactccactcactctctacatattanatattctcaatgtataacagatattntttgtgacactggattccattcccacgtcttattggtagtattatagaagatgtgcagtaatacgggtagtctcttgacatgtgtataccgtgtacagctcccataaaataaagagtaccacataatcatatgatcaatttcactgattctctcatgcttctattntatcttttggtgaaatattcctttgctttnttcgaattntacactccgagagaaatataaatcctgataggctag

SEQ ID NO: 304227 - DNA, 439 bp, Glycine max
gatctctaagcgactgagcatgcaagctttgtactccactaaatttgccttttgttgaccaaagctaataccgctgacaaccttgtgaaagctgtgcacccaggatacaaaggcatctttgaatcattttctattttctcatacaaaggtacatgtgcttgttgaaatctgtcctgccccaaattgcaaatcatgtcttctatacggtatcccatgtctacatcgactgactcagggtgagagactgatggcttgtttggcaattccccatgccatatccattttgtgtaatttggaatgatcctatgacatatattgactggtgtctcctattcccacattttacgcatggacagaaaaatttaccccgcacacatggtgcattgagtttagtaaattggaggaattggtcaactctattctcatactcgtcactgat

SEQ ID NO: 304228 - DNA, 439 bp, Glycine max
  unsure (1)..(439): unsure at all n locations
tgtgccttttcacgtctggaatatgaatgtagcatatagattcaaagacccttaggtgctttgttgatggcttcttcccgatccaagcttcaattggagtcttgtcttttacagacttagttggacatctgttgagtatgtaaacagcagtgtagactgcttcagcccagaatgtgttaggtagtcccttctccttgagcatcgatctagccatctccataactgtgcgattctttctctcggacactccattttgttgagaagaatatgcgactgtaagttgtcgctcaatgccttcatcctcacaaaatctttcaaactcgcgagaggtgtactctttgctgcgataacttcttagtacttttatccgttttccactttgattntcagcaagggccttgaactttttgaatactccaaagacttctgattnttcttt

SEQ ID NO: 304229 - DNA, 442 bp, Glycine max
agcttgcttctgaagcttctatggaggtcggatctttgagcttcattgttgtccttcaatggcgattttccaccatgcagaaggcatcatcctctaggaaataaggcatggaagaaggagcttcaccatcaagagagtgtcttggataagaagctcatagaggaagcttcaatggaggaaaagaaagagagagagggagggagcacgaaattgaaggaggaaaagagagagagaagttgaactttgaagtatgtctcacaagactctcattcatcaaagtttaaggtagtcaatacatagcaatttaagttgcatggaccatttaagttggctcacaaatcccacacatttgaaggacctaagcttaatacatagcaattcgaagatttctatatatttaacatgtgagtagggtgtgataaaaccactctacacaacatgt

SEQ ID NO: 304230 - DNA, 367 bp, Glycine max
  unsure (1)..(367): unsure at all n locations
ttcataagtgagatcaggtgcagtcatctccctaagagtcctctcacgatgtggagggtgagccatgttctcagtatataaattattagtggaatgctcaacatcagaatattcataatcaccctcaagagaatgctcacaatgcacataatgaccaggatgcacagtatgcctaattaatctatgaaaggatctatctatttcaagatcaaagggttgtaaatcacctagaatgacgctagtcatgcactatatgcagcanataatgtgtttcttaacaagcacctaacaagggggtaaaactacaactatactcagacgatatcataatgagcttatattttgtgaggaacaccctatgatcatg

SEQ ID NO: 304231 - DNA, 436 bp, Glycine max
agcttgtacgcacatcgttcgcgtgtatgatattcactccattagtttgaagtagaggagagcttcaaccttataacgcaacgtggcggacaaaagtgggcaattaacttgaatggtcatcattgtcaatgcggaaggtattctgcgcttcactatccatgttcacacattattgcagcttgtggttacgtgatcatgaactactatcaatatatagatgttgtttatacaaacgagcacatcttaaaagcttactccgcacaatggtggcctcttgagaatgaagcagctattcctccttctgatgacgcatggacacttatccctgatccaactacaattcgtgcgaaaggtcggccaaaatcaacaaggataagaaatgagatggattgcgtcgaaccctctgagcaccgaccaaaatgtagtagatgtggag

SEQ ID NO: 304232 - DNA, 417 bp, Glycine max
  unsure (1)..(417): unsure at all n locations
ctcaagcttagtgacatctgngacttgatcttaagcgaagatgttcgcatgatttattcangagaattttccagtcatgttatcaattcaacattgaatactgaacgcaagggaacgactacccataacggtcagaatggtcgacgcatatcaaagcccagagggaaaggtcatagaaaatttcacagtgacgttacttgctggaattgtgacaagaaaggtctctttatcaatccgtgcatggcaccatagatgaacaagtcgcacaataacaagaagcacgatgatgatgaatccgcatatgcatcaactgatgaacttgatgatgcattatttgcagttggatagtcctgttgatcatggacatggactaggtgtgtcgtttacactactcctctaaagattattgctaactat

SEQ ID NO: 304233 - DNA, 433 bp, Glycine max
agcttgccgctggagctgacccatcaattgttctaactcttttagactgttgatccctaggctcttgaccttgacttgatagaacctctttttaagcaaaggcgtttgacttgatcccatgttttactaaagtgaaacaaaatctaacgcgaatcagaactccgacatctatcatgggtggaatggatgaatgcgtgaagaaatgcgtatgatatagatgcaatttatgaacacgggagcccgggaaattgtctccttcttagatacaacgtcttggggtagcaaagtgtccgacgtatgtatttaagaaggtgacacggaccctccgttggtttgccaaagacaggggatatagacagaacccgtgcatgatgcatatgcgaaaggcacaacactggaatgtacatattatgacaatattcacaaaatataa

SEQ ID NO: 304234 - DNA, 453 bp, Glycine max
  unsure (1)..(453): unsure at all n locations
ntgagaaacatgcaaccctttggcatcatcaaaacattaagttttatcctttgtctacaatctccccctttttgatgatgacaatcctgaaatcaagacaagctatatacaagatgatagcacgttcacacagcccttactccccatatcttttggcatgtatgcctaactttaatgatttttaatgattttaattgatttctaacccaagttctctccccctttggcaacatcaaaaagaactaagcaagacaatcaatagctaaacagagccaaacattaaaccaaaataagtccatacattgtcataaccaaccaaagcaaagtccagaaatataataatagtgcaagattacgataactagagcaacaaatagccaaataaacggcgataaaccaaaagtactaataatacttaatcactaataatacttagtcataatacttaagcta

SEQ ID NO: 304235 - DNA, 442 bp, Glycine max
agcttagacgaacttgttcgagtcgagatgactttattatttatttggacaagttcgaatataatgtagaagatagtgaatgtgagccttttacccctttgaaaggcttgtatttaaaaatgttttaaaaatacttttaattaaatatttgaatttttattcctttattaatatatatgtgaggggtagaggatgtcacacaaggcatatttaatgtgagcctttttttactttattgtccactcctaaccatgcaaatcaatggtgagttgttgatctagtttcttaaataatagtattataatgggaacacacatgaataaacaatatttcttatactgtttcaactacgtgaataaggatccctctagtttaattaattagtgctaataacttatacgtgtaacgactacagctagaacctagaagttgcatgcctttt

SEQ ID NO: 304236 - DNA, 522 bp, Glycine max
  unsure (1)..(522): unsure at all n locations
acccacaccccgaccacgcacaaacacaaccgccaaaaactccaaaaaacaggaatgctgctcctgncgcaccaaaaaaaccagccgcaggcacgggacccagacaagggngcgacccttcgtcgcgccacgatgacaatcggcaaaaggcgacaccgcgacagccagaacacctcaagccccggacggccaccagcgccagaaccgacgtgcccccacacagcccacacgcatcaacctaccacaacacgggccgcaccatacccccaaagccaaccgaccagggcagcaacacaacaccgcaaacgcaccaaagaaacacaacgcaagacagaccggcatacgcagagaaacccggacccaaacccaaccaaaagcacacccttgacagcaccagaccccaacaccaagtacctgcatgcaaaccacgacacgaccgaccgaccgtcaacggaacaggaagaactacaccaacagcccgcgtctgcacgagggacagcagaaaacaacacagccaccccg

SEQ ID NO: 304237 - DNA, 393 bp, Glycine max
  unsure (1)..(393): unsure at all n locations
agctnttgttccatttttataaaaaagagaagttctgaaactcatcacgttgtctaaaaaagggtcttgaggtggatctaagtgctctgatcattcattagcataacatattcatgatttgttggcatgctcaccactgtttgtttctttaggaaactcgccataactaaaaaagcgcaaaggcacccctataacacccgatccaaaagtaagatgggtaaggaagagggagtgcaagaacagatgaaggtcgacatgtcggctttaaaagatcaatggcttctatgacggaggccatgctaaaaattcaaaaatcaatagaagacaatgctacggcggccgcttncaacacaactagggaagcggaatcggtgctacaacccgcaatgaact

SEQ ID NO: 304238 - DNA, 438 bp, Glycine max
tgaatagcctcaagtttaggggcaaaccgtattctttgaattatagagccaaagaatgtgctctggaagcgtgattcaaaagatttatgattaggactgcttctttgtcgagtctatcaccaatctcaaatcaatgttcctttgttataattaattagaggttactattaggcacgttgtggtgtaactctattaataatacacatgcatttcacattctatcaataatacattttctaattctctgagttcctctcttccgttattattatgttctatcatgtttctcaacatttctcaaaagtcttagcacctataataattaaaggaataaatttaagaatataatgcttatgaacagcgtatagacttttattcaactgaatatttccttcatccaaaaacaattattatttttgtacttttcttttaagtaat

SEQ ID NO: 304239 - DNA, 429 bp, Glycine max
agcttgacgactgtggactgattatattctcttatgaaatgatgatcaatggcaatgtgcttagatcgttcatgatgagcaggattcgaagcaagacttatagcagatgtattatcacataataacatcgcagatggcacatcaacttcagagtgaagaagtaacctgtgtaaccaaacactttcactattaacacacgacaagacacgatattcagctatagtggatgattctgaaacagtgggttgtttcttagaacgccaagaaagaaggttggttcccaaaaagacacaatagccagaagtggatcttctagtatcaacacaattggcccaatcagcatccggacaggcactgaggtcgagagagttctgagcacggaataacaaaccttgtccaggagcacatttgatatactgcataagatga

SEQ ID NO: 304240 - DNA, 405 bp, Glycine max
  unsure (1)..(405): unsure at all n locations
agcttctaaactntatacaagaatgaagctctgataccacttgttagacaagtggcctcaaatatctacagaaggtgggggggttgaattaacatatcacaatcttttctaaattaaaaattctattttgattctaacccatatcccaagatttctttcaaaaatgaactcctaaataattatgcaaattaatcttactaaatagaaacaataagcaatatacaataaaagagtttaagggaagatagattgcacactctgatttatactggtccggccacacccttgtgcctacgtacagtctccaaacaacccgcttgagagtttcactatcttgcaaaagccctttacaagttctaaaccacacaaggacaacccttcctttgtgttaaaattctttacaac

SEQ ID NO: 304241 - DNA, 187 bp, Glycine max
tctagccaaatggacttaccttgaattaatcctttgttatctctcttttgagccttgtttccctttccttggtttgaagctcactacaagccttaagtgaaaaaccatgatatcaccatatccttaaggaattttggagctttggaattgttttgggaataagtgtgtgtgtgtgtggggggggggg

SEQ ID NO: 304242 - DNA, 494 bp, Glycine max
cgcgcgaccgtttgaacacctttcgagaccctgggaggctctagagatgctctgcaggcgtgctgcctgcctgctagcttgtgaccacacaagatgctctatcatctcttataccgtttgaccactcgcatgtactacaggacgaggttgatcatcactgctatccaagaccatatacttggctccttgatcatctagcgagcaccattacgtaacctaaactctgcttcctcatatatcataagtggaagggaggaatgcatgaacatctgcacatgatatcgatgcccttatttaacacgggaacccggtatatcagttgatttgatagacaacattggttactcacatagacggactattgtttatgatagcgacacagacactcactgctttaacaagacgcttatatagaagaactcctgcaaatcatatgttatagcacaaactgtaagtcatggacgaagtatgccaaaaagagctcgcggacatcc

SEQ ID NO: 304243 - DNA, 451 bp, Glycine max
  unsure (1)..(451): unsure at all n locations
tgtaggattatggngtacccatcacatgtggtactatgtggttgtcgggcgatggtgcacaacaagttttccacatccacaaatcgcacataaacccacaatcccctgttgcccacctccaactgagctcacgtactcccacgtagcccatatcctcgtttctctcaacaccgggtccccatcaatcctcccaagcttccccaacatccaagtaattcaacattcaaacagcacaaactatcacagccaagaaaacagggcaaaggcagaaaactctgcccaaaacaccaaccaaaatcacagcttttcccacttaaagaccccagtaacatttccttcgttccaattcgttaaccgttggatcgactcanaaattntactggaagtctctagtacataagcctacattntgaccgttgggatttgctagcaaatatccagaaatcattct

SEQ ID NO: 304244 - DNA, 428 bp, Glycine max
  unsure (1)..(428): unsure at all n locations
agcttagtgtaacattaagcttcaacttacttgagnagtcaggcttagcgcaacaggtgcactaagcgcacttccaagaattcanaacccgtaaaagattggcgcttagcgcttcctgacccgctaagcccagcttaaaaactcaagttacaaaatggatcaagggcttagggcagcatagcacgcttagcgctgctacaataaaatttttcccgagaagaagtggtgcttagcgcatcatccacgctaagcccactggttaaagttcaattaccgcaaagatgtggggcttagcacagtgttgtgcgcttagctaaactattcaaccaaccaatcaggggtctatgcgcttagcgcgagcaagcttggcttagcgtgtgaagactaagcgcttagcggatagacaatcgcaaaaaaatttctaagtc

SEQ ID NO: 304245 - DNA, 443 bp, Glycine max
  unsure (1)..(443): unsure at all n locations
tgaaggtgtgtagcccaccatcttttcatagttgaatattgttaatgtgtctactattattgtcatcatctttttctccgtcattgaggtgccacttgagctgccaggtctctccacctttgggcgtattcttttgaagaatttgtgccccctttttgcacatgttttgtagttgcatcctatccgaagccattataccgacactgcctaacgaaggcaaccattaggtcctcccaggaatggactcgggaaggttccaagttagtgtaccaggtaacaactaccccagtaagactttcttggaaggaatgtatcaacaattcctcttcttttgcgtatgcccgcatcttccgacaatacatctttagatggttcttggggcaagtaatccccttgtacttgtcanagtccagcaccttgaacttgagaggggtgatgatatt

SEQ ID NO: 304246 - DNA, 394 bp, Glycine max
  unsure (1)..(394): unsure at all n locations
agcttgagatgatgtagtgtagaagggtgaatcttcctgcttttattcgttgaccacagagtggtacctggagatatgtcgcggnggtcaggagaccttggggacatcaggtggggtgctattgcccaaaaccaagcttgaccaatctcgacccaacccgggcatagtcggtcagtgagaacctgtgatgtacctaaacaggcgagctcctggcagtcaacagataaaaggaacaaagaccacatagcaaggaggcttgtggtggctggccagctgtgaaacttgattgatatgtgagatatggtctctggtaatcgattaccaagggtgggtaatcgattacaaggtttaaaaatgaagacaggaggctaagatggtctctggtcatcgatta

SEQ ID NO: 304247 - DNA, 395 bp, Glycine max
  unsure (1)..(395): unsure at all n locations
ntataagcgcgggtctgtgagacgaaggtcaagtgtgtttcgatatacgaagatgatgttccgagtacattggatttggtacgaccatgccctcctgatttccagctgggaaattggcgagtggaggaacgccccggcatttacgcaacgagcataatgtaaacctttacggttttaaaagctctatagttgggcctaggctttagagattttcctattgttaaggctttgtgtcttttgtttttgaatttataatacaaggatctttcttcatctgttcctacgtctctacccattctcattcatttgcatgtttacttctttttctgaaatggcagatccaatgacgagtcccccgaaggtactaatacctgagacccgcctatcgacttcga

SEQ ID NO: 304248 - DNA, 417 bp, Glycine max
gtcgcctgcagcatgcaagctctgaggagttaacaatattctcatgttgtcatcatcggaagcgaatatgtgaatgtatgtatacatgatctcgatgatgtcacagacgaatctaacaaggctgcttcataggataagcatttgcttcaagaataattcatgattgcttcaacaaacaaagccttgcttcaagattcactaatgaccaagccttgccttataacaaagtgctttcaagacatgcagggctctggtaatcgactatcaggatgcgtcatcgaccaccagaggacagggtcgagacatactcgatgaacacgctctgaacttgactctctacctgtaatcgataccatatgtctgcactccattaccatcaacggaactttggaactctacattccaaagtcataaccc

SEQ ID NO: 304249 - DNA, 590 bp, Glycine max
  unsure (1)..(590): unsure at all n locations
accgctcccttacacttacctaaccaacgctaatctataacatgcatctaccaccaanaaaaaacganaaatttgtagctgcatccntagcnannacgngaactatanactactcagcttggagcgtagaagaaactactgtaatggcatcgttattatctatgtatgagcaacaacgcattacagctgcgctaagaatgaacatcacactttcacttcttctcttatgagtgtactcgcattatagctactcccgtgaatctctggtgcctacagtatccttctacaaacttaagttgaatctttacccaatgacctttccacgaagctaacgccttattctgtaagactacatcgtattctcgcacatgcgaatcggaattcgtatatcgacagtcacacaatatgcatgcgtgtaacgtatactcaactaacctccttagaacacaagatgatactcggtgttattaccgctaggtacactcatcatatccgagcttttagctgaatgagtgctacgccaaaactacccagatccatntcttcttttgctaacgcgactgatccgagagggcgaccgacgatcgacg

SEQ ID NO: 304250 - DNA, 435 bp, Glycine max
  unsure (1)..(435): unsure at all n locations
naagctttgcagtgaagagtgatgttgtttacttggtttacttcttcatcttcgtcagaatcaccgctccttggcatcaccattcatgtggttggacttctaagacgtgcttcacaacaactatgggtaccgccatgagtgcaccgtgacttaatgtcagagtatttcctcgtcagaccattgatgtaatggtggagcaactcagatggagagatggaggacatctcagatctgaaaggggaggaagaagaagggataaaaagagagaaaaaaaaaaaaccaggggaatgtccggaaagggggggaaaaaaaaaagagaataagtcaaagaaaaaaaaagaataaattcacggtacatgtcatgtcactgatatcttctatgtgactatatatacttgtatcactgacattatgagaaaaaaataatttacagat

SEQ ID NO: 304251 - DNA, 447 bp, Glycine max
  unsure (1)..(447): unsure at all n locations
cttgtgtaatcgattacactgatctggtaatcgattaccagttattgtttctgaataaatcaaaagatgtaactcttcaaatggtttttgactttttcaaattggtttcaagtttttttaaaagtcataactcttctaaatggtcctcttgaccagacatgaagagtctataaaagcaaggctttgttttgcattttataacaatccaatcaatctaatacaatcctttactaggcttgaatctctntgaacttcttcttcttctttgtgccaaaagctttccaaagttttctggttttctaaaccttgaaaacttgtgctattcattcttttcatctcttctccctttgccaaaaagaatttgccaaggactaaccgcctgaattctttntgtgtctctcttctcccttttccaaaagaacgaaggactaaccgcctgaattcttt

SEQ ID NO: 304252 - DNA, 430 bp, Glycine max
  unsure (1)..(430): unsure at all n locations
agctntgcagatttggtcttcgccagagaaaggatcgaagtgggtctgaaaagaggcaaatttaatcatcctgcttgggcgaatgagaaaactggggcaattgaagaaggtgaggatgagggagaaacccatgctgtgactgccattcctatacgaccaagtttcccaccaaaccaacaatgtcattactcagccaatgacaaaccctctccttacccaccacccagttatccacaaaggccatccctaaatcaaccacaaagcctgtctaccacacttccaataacgaataacacttttagcacagaccaaaacaccaaccaagaaaatgaatttgcagcgaataagcctgtangttcaccccanattccggtgtcatatgctanactngctcccatatctacttgatactgcaatggtagccataacc

SEQ ID NO: 304253 - DNA, 428 bp, Glycine max
  unsure (1)..(428): unsure at all n locations
atacaaaggtgttacaagagaacctatctgtttctaattatatgggccatcaaatctatcatgggnngacagnaattgattagcccatgaatctcctcgggagccgtacacacttcggccatggcttttgctttggctaatagacgcgggaggtcttgacttccattcaaggtcaaggcgaacctatccatccacatagtcgcttcttgatgcaatgcatcaatcaccctccctcttgcttcttttttggcgtacacttgtgcaaaatcctccgctagctcttgttcatgggtcacagactggttcaactcttccttgtattgccctatgatagctagcatgctgtgctctgcggcttccaagtgttgagccaaactcctcttggaccttgcgcacgcagctaactcttgttttaagatcatgccatg

SEQ ID NO: 304254 - DNA, 412 bp, Glycine max
agctctgattatatggtcttcaccgacgaaaggattaatgtgggtctaacaaaaggcacatttagtcatcctacttacaccactgacaaaactggggcacaagaagagggtgaggactgaagagaagcccgtgctgtgactgccattccaatacagccaagtttcccaccaacccaacaatgtcattactcagccaataacaaaccttcttcttacccaccgcccagatatccacgaatgccatccctaatatcaaccacaaagcctacctaccgcacttccaatgacaaacaccacctttagtgtaaaccaccacaccaaccaagacatgaatttcgagcgagagggccttagaattcaccccaagttcagtgtcctatgctaactatgctccatatttacttgataattc

SEQ ID NO: 304255 - DNA, 246 bp, Glycine max
agctcgaatttgaacaacagaagctcttgagaaattcaaatggccataacttatcacacggaagcccgaatcatgcgcataatatatcgagaccctcgaaattgctcatcaggaagccctcaagaaagacaaatggtgataactcttcaaacggaagtcccaatcacgagcatatatatatcgagaagcttgaaattgaacaatggacgctcttcagaaattcagtcagtcatatctcatcacacg

SEQ ID NO: 304256 - DNA, 281 bp, Glycine max
tcgaacaacagaagctacgagaactacaatggtcattatatgtcacacggaagtccgattcaggtgcataatatatcgagacgctcgaaatacaacatcggaagctctcgagatattccaatggtcataacttgtctcacggatgtacgagtgacgtgcataatgtatcaagaagctggaaattgaacaacgaaagctctcgagaaactctgatggtcataacttgtcacacggacattcgacacacgcgcataatatatcgagacgctcgaaattgaaca

SEQ ID NO: 304257 - DNA, 424 bp, Glycine max
  unsure (1)..(424): unsure at all n locations
agcttatctagacacaatatatttcaccttanataattgttatctaaacttttttctacgtaatgcggaataagtaaaaaactcggtggattaacaacaaattattgctttgtgtttgaaattattaagatgtaacaatgtgatgaggaaactaaactcaacaaactttttgcttgtagggtctacctattatgcaaactttaaccctcaagtctcgaccatgaaataaacagtagaggtgacagaaaggttgggatggctnggatgcaaaaggtacccanatccanagaccnagctggcaacctatatggacacacgctgacaagcccaggactctnttttattccatatacatncgaaattgtttttttttttctctctctttgggtactaatgtattttgatgtgcatgttcagcatcaat

SEQ ID NO: 304258 - DNA, 488 bp, Glycine max
  unsure (1)..(488): unsure at all n locations
tctnacaaactctgctagtgaaattcacatcacatcactatacattttatcttggattttgcatcagacctgggagatgcagatgttgatgaagatgaatgtcttccagtgtttcttgccacctgaaaatagcatcaccagaaaattcttaaaatttcaactttcatataagcagagctagtagagtagtcaaacaccatatcattttcttagaaaagagtttataattttcatgcacttagtgtaaagagttttacattatcaacaaattaaaaatcactctaagaatgactttctaacaatcttatcatatatgacaacttgtgactgaatgatggtgtaaaattaaattggtagtatattatagttaaaattctataaanatgatcaggtatttgctacccaataatatagatcctccacaaaattganaatgatcacatccattggctgccactcaataagataccaaagcaactgacaacact

SEQ ID NO: 304259 - DNA, 398 bp, Glycine max
  unsure (1)..(398): unsure at all n locations
agctntggattatatatatcttagaaactttttcactcatgcactcactcagcgcgccctatgcgctaagcgtatcattgtgcacgtgctgagcgagtcattactcgcgctaaacgcaccatcccctactcattggttgatgaagcatcgctaagcgagccatgtgcgctaagcccataaacctcactggaatttcatcttttggaattgggctaagcgagacatctcgctaagtgccccagtgcgctaagcgcaataccctctctgttcgaaccttcatgtgaattgggcccaataagtcaacctgctaagcccaaatccctttccgggttggaattgtgctaagcgagcccatctcgctaagcgcgccccactactacatcatgaagcattaattc

SEQ ID NO: 304260 - DNA, 437 bp, Glycine max
ctttgtcgcgatgacgacatcctcttatacttgttctatgagatctatatgtacctgcaatgctctgttgttttcggcctgtacgaagctctatcttcttagtgatatttctcccacttataccgggaccataacatccatcccgtataccggccaaaaaggtgtctcttgggttggaaatcctggagtaaaccaatgtgcccataagatttcaaggagctcctcagcccatctttccaatggcattgtgtagccatttctttagttccaccaaaattacttggtcgttagtttaatggtgttctactagcggaactcgtgcttgatgtcgatgcttgatataaactcgatcatatttcagtctgggaattgtaacatatttcggtaccacaactcatggagcgccgagcgagtgatgatattctccaatgaacttt

SEQ ID NO: 304261 - DNA, 424 bp, Glycine max
  unsure (1)..(424): unsure at all n locations
agctttgggccttcaggccaaaccaacgaacccactctgggtcttggtcgacaatggccaccaaattgagtgcaaccacatgcgtgcagtagttccagtggatgtccaggtgcagatattttccattgacctccatgttttttccctttgtggtgcaaacttagttcttggagttcagtggctaaaatcattgggactactccttacaaactacaatgatctaacaatgaaattcatatgtgttggccttgtggtggatctgaagggggacatggttctgaagtgcggtccattacgccaccacaactatgacgtttggtccataaggatggagctagtggnttcttccatattcgcatggtatcatgcgagcccccttcaacctanaccatttgttcacccactaacactctagaaatagcat

SEQ ID NO: 304262 - DNA, 230 bp, Glycine max
gatggcaatgagaagaaggatcaatgctagaaatttgcaaaggacaaatggttggcaaagtggggggctggagagaacatgattgagttgtaaatcccgcacagagtagactaactcgaattgacacccgtacatgacgagaagatggcttagaaaatgattgtggtggcagtttgctgctgtttgtggaatgctgaaggatctgatggactgagatgggacggtaaaaa

SEQ ID NO: 304263 - DNA, 405 bp, Glycine max
  unsure (1)..(405): unsure at all n locations
agctttgaggaaattcaaacgacaataacttttgactcggatgtccgattgtgtcccgtagtatctcgagacgctccaaattcaaaacagaagctattagaaaaatctatggacgataactttttacacggatgtcccattgagtcccataatatatcgagacgctcgtaattgaaaacagaagcgctgaccaaattcaaacgacaataacttttgactcagatatccgattgtgtcccgtaatatatcgagacgctcgaaattcagaacaaagctattagaaaaatcaaacgacgataactttntacacggatgtccgattgagtcccataatatgtcgagacgtttgatattgaaaactgaagctctgagaataatcaaacgaccataacttttaactcggat

SEQ ID NO: 304264 - DNA, 470 bp, Glycine max
  unsure (1)..(470): unsure at all n locations
ttacgagcgtctcganatcctacgggactctattggtcatccgagtgaaaagttattgtcggttgaatttgtttagagcttatgttttcaattacgagcgttttgatatcccacgggacacaatcggaaatccgagttaaaagttattgtcgttagaattttctcatagcttccgttttcaattacgagcgtctcgatatcctacgggacacaatcgaacatccgagtcaaaagttattgtcgtttgaatttgctcagagcttcagttttcaattacgagcgtgtggatatattacaagactcaatcagacatccgagttaaaagttattgtcgtttggactttaatagagcttctgttttcaattagagcgtctccatatattacgagactatattagacatccgagtcaatagtatggtcgtttactttcacagagcttgcgtgttaatttgagcggccgatatatat

SEQ ID NO: 304265 - DNA, 424 bp, Glycine max
agcttctgttttcaattacgagcgtctccatatattacgggcctcaatccgacatcggagtaaaaagttattgtcgttagaatttgctcagagcttctgttctgaattttgagagtctcgatatactacggaacacaatcggacatctcagtaaaaagatattgtcgtttgaatttgctcagagcttctgttcttaattacgagagtctcgatatattacgggattcattcggacattcaagtaaaaagttattgccgcttgaatttgctcaaagcattcgttgtcaattacgagcgtctagatatattacgggattcattcggacatccgagtaaaaagttattgtctttttatcttgctcagagcttctgttttcaatttcgagcatcttgatatattacatgactcaatcggacatccgag

SEQ ID NO: 304266 - DNA, 469 bp, Glycine max
  unsure (1)..(469): unsure at all n locations
tgtagaaaatcganacgacaaannattttatctaagatttccgaataaattccgtagtatatcgagacgctcgaaattcaaaataaacctctcagcaaaatgaaacgacaataactttttactcgaatgtccgaatgaatcccgtaatatatcgagacgctcgtaactganaacagaagctctgagcaaattcaaaagataataactttttactcgtacgtccgattgtttcctgtagtatatcgagaccctcgtaattgaaaccagaagcccgtagcaaactcaaacggcaataaatttttactcggatgcccgaatgaatcccataatatatcgaggcgatcgtaattganaacagaagctatgagcaaattcaaacgacaataactntntactcggatgaataccgtaatatatcgagacgctcgtaattganaacaaaagctctgagcacattcaaacgacaata

SEQ ID NO: 304267 - DNA, 413 bp, Glycine max
agcttcacggatttgcttacggaataatctcggaagcgttacggaagcacctcgacttggattttcttcacggaaacaattgttttcacccaaaacagcagttgaagaccgaagaaaacgaataacgaacgatgaatgtcgaacaacgattgaaaatcttcgcgtaattacccacggaaacgttacggaagtgcctcggcttggattttcttcacggaaacaatctttctcatcaatttcaagagaatacgaagtaccaagaaggctgaaccctctccttcttcattcctccgcctatttatagcaaaataggggaggagcttgcacccagccacccaggcgagctcactcgcccggcgagctaattgttccttcgaacaaccgcttctgaggaagatatgaaggccgagtgg

SEQ ID NO: 304268 - DNA, 436 bp, Glycine max
  unsure (1)..(436): unsure at all n locations
gcttccatccttactctnttttttttntttgttntggattatgttcaatatcttttatacttggtatcaagtattggattgcgtactttcatacgatgaatctaagagaggtgtcctttaagagacatcgatacatggtatctgctttatttttctctttgcagattgttagttacatgcatgttgcggttcatattttacacagaatatttcttcttttacaacttgtgagtgtcatccattttatcacctggtggaataagtactggactccacatgaagaaaggaagcagaggtacacattatttctgcaataattcatagataaacctgaagtcaaattttacatcttgttctgaggatgaagggaacatacttgacttctgaatcagaattgtgtacacggtatttggtgtttgataaatagactaaagac

SEQ ID NO: 304269 - DNA, 412 bp, Glycine max
agcttatataggaagcttcaaaggagaaacaaaatgagagagaggggaaaaaagtgacatgggaatgaaggaaagatggggaaagaagttgaactttgactcgtatgcaatatcatacttcgagagttcaattgaccatgtcatcatttgtctgactaactcaggcttgcgtaatatcttgcctattgggcaatcagtttgaacagtgatcttgtggctctgaaagtattgtcgaaggtagcaagcggcgttgaccagtgtgagggctaccttttccatcacctgttacctcgtctctagatcttacagctcccgacttacaaagtatatcgacctctgctatcttccttcctcttgtatcaataccacgcttatggcctcgatcgagatcgacaggtaaacaatcaatctt

SEQ ID NO: 304270 - DNA, 403 bp, Glycine max
  unsure (1)..(403): unsure at all n locations
tataagtgaggcctngtgagaggatttgtccaaaccctcctatatcagtacttgtagtaataaagctgacactactactactaaggcaaggataagatgcagcatcgaccaaagctntctgaagaacaaatctgttaagggtaccacggaacttcttgaacagcatgtgtggaggccccagagagggttgccagagcgtgcagtggcaattcttaaagcctggttatttgagcattttcttcatccgtatgttagtctctatctatgtctcttattaatatatttcttgcttcgtgactctcttttctgcattctaaagagacatttggattgaattgtgtgctttttttgctgatgttgaatatctctttcattaccctacagacactgattaacacatgct

SEQ ID NO: 304271 - DNA, 405 bp, Glycine max
  unsure (1)..(405): unsure at all n locations
cgctngtaatcgattaccgcgagctgtaatcgctacaataagctccctgtctataaaagctgcatttctcttccttgcgcaaaaccctttcttcctctttctccttgatgacgcccaaccctctccaaacttcagatcttcataactctctcatttattatccaaatcacttcaaacaaagctcagatttcttctttttcaattctctacaaagcccgccgatcaaaatttgctgaaacaagctacaatggcagaatcctcaaagaagagaaagggatcctcctccaccaccaccactgcaggccaacgccgccacggcacatccgatgacccaccaacatcaaatcctccttccttttcatctcccacgtcattaactgttgcttctttcaatgaccagcgcta

SEQ ID NO: 304272 - DNA, 389 bp, Glycine max
  unsure (1)..(389): unsure at all n locations
tcaataaaattacttgcccacattatgcaattcctacaattgttagtcagattctttgtgatatggaaatactatcataatttgcaattgtcattaacactggtttggaaagaataccgcgcttttcaatttgtcatttgattgtcttttctttggaattatgttacatacatagcagttttgcttctaatgtttgatctaacaacttagtcatgtcataacttttgttntgaaatattattcctcattgtgggtttgcatacactactaaatactggacattctatgtcggttatttaggacattctaaatcggntattaaccattgtcatagacaacgccgtanaatattcgcatctacgatgatggttaccattttagaatgtaat

SEQ ID NO: 304273 - DNA, 417 bp, Glycine max
  unsure (1)..(417): unsure at all n locations
agctntgcatgtcaagctttgcacaagacctatgggaagatttgggatctagctatgatagatgtttctattgaagccattgcagccctcactcagtattacgatcagccactaagatgctttatgtttggggactttcagttagtaccaaccgtggaggagtttgaagagatcttgggatgcctgctacgaggaagaaaaccatatcttttttctgggttctatccttccatggcgagaatagccaaggtagtcaaaatctcggtgcaagaattggaccgagtaaagcataatagatatggcgtggtcggaataccgaggaagcacttggaggagaaagcgaaggctctggcggatcgaggtgaatgggcttcgctcattgatgtcttggcactattggtatttggagtcgtcctc

SEQ ID NO: 304274 - DNA, 432 bp, Glycine max
  unsure (1)..(432): unsure at all n locations
taacaaggtgtgttntatgcttgagaagccttggtctatatgctgtcaaccatagtcaaccaatcaaagtaattaagataaaactattttgagcattgataatattagtttatctgtaattaagaattatcatgcttttagttcaaggaaaattctaatatgcattaagaattaatttattgagcataattagtgttgtattcatagaagattcatttacaactagatttgagtgattccaaaggcattgaactcatacaattatttgtgacaatatggtttatttactggagtcaaaataattaaaataggatggttagatatgccaacgaacatttttaagaatcatatgttaggaatgactaaagagtccttataccttattttggagtcttcatacaaactaagagagactcctcaccctangagctg

SEQ ID NO: 304275 - DNA, 427 bp, Glycine max
  unsure (1)..(427): unsure at all n locations
agcttatgctacaaacatctacaacagacctcctcaacctcagcagcaaaatcagccacaacagaacaattatgacctctccagcaacaggtacaatcccgggtggaggaataatcccaaccttagatggtcgaatccttcacaacaacagcaacaacaacaaccttattttcaaaatgttgctagcccaagcacaccatacgttcctccaccaatccagcatcaacagcagcaacagccccagaaacaacaaatagttgaggctcctccgcaaccttcccttgaagaacttgtgaggaaaatgactatgctaaacatgcagtttcaacaagagaccagagcctncattcagagcttaactaatcagatgggacaattggctacacagttaaatcaacaacagtcccagaattctgacagattacct

SEQ ID NO: 304276 - DNA, 488 bp, Glycine max
  unsure (1)..(488): unsure at all n locations
cgtcgtatggganaatcagaacaacttactgaagggaaaactatgttcataatgtgtacagaggaataaaaaggggtctatttgcatataaattatattaaaattgataagactttaaacatgtacctattaatcagctcttgaatttcaaaaaattcttcaatagtgtgaagattctatgtgtgtccacaccgagactaacctctattatcaactactttgatgagcagaatagaaaaaatttagaaaacaaaccttaaaatattttggtgcttgtgtactgagtgaagaggaagaaaaaatgataagtgtttntcaacgtgcaaagaatataataatattctacttataaaattaatgaattatttgatcaaattaaattctctaatttaatcatcanatattaaaatagtttctttaatagacattagagcattcgttggtatatgaccccatangttcaatactaagccaataatatattaatc

SEQ ID NO: 304277 - DNA, 426 bp, Glycine max
  unsure (1)..(426): unsure at all n locations
agctnttgatggatctttgcttctgaacactctttctcagggtttatttttcgtgggttattgattaataattaaaaacctgatccaagtgctcctctataacattgctacatgagtaactcgttgtttgattataatatataaccttaaatgtccttgaaaggagttggactaatggattgttttattgacctgtggaaaatatggcatcgctgttcatatagntttgtgaaaacacttcttaatttccatggcaacacgaaataagtcattttattcacgttctgctactagatgttaacttaagaataaatataaataatactatcaccagtattttaattacaatattatcatattgtaattaacatattggtcttcatattataaatactgatctattgattattagtaatattgataata

SEQ ID NO: 304278 - DNA, 460 bp, Glycine max
  unsure (1)..(460): unsure at all n locations
ctcacaagatctgtgttgccttgcttctgaaggaaaggccgtgcataatcagagggaaaagatagaggcacaagagcatcaaagtgctcaaattaattcagagtatgcagatgcaaaaaggcttaactgcagttcactagtaatagatttgcagtttacatccccacctatacctgtcgatattcctgagagaaatagaagtcaaaataaggaagaactggttttattagcttcaaatctggagtcacatgtttcccaagaaggacatgttgggagtattactgatcatagcttgttggtaagtactaaagctgagggtggtactgtcatggtaaataaaacatggttgaagaatagcatggcgaaagcaacacgagtgcatctcaatactaaacctgctgttggagtgcctctcaatagcatggggaaagcagcaagagtgcatcttantactaaactt

SEQ ID NO: 304279 - DNA, 429 bp, Glycine max
agctctacatatttgttttaatatctatatcggcataactgcactgttaaaggtcaatcagtagatgcacattatgttgattcaaccagtatgtgttcttgccatgataatgtgccgcttatgaagatttgtcgccggcccgaaaccgattatcggttacagcaacttcatgctgtgaatgaggcagcacctgtggatcagcagaagactggcatggatccagcatcaaatgttaatgccgtgagggctactactactgaaacagtgccaaagcagctgattgcagcaaacattcatatggagacgacgccagttccagttgtgcaaacaaatgttcctcaacaacctccacaaagtatggatattgatgtggatcataagaaagctgacacaattgctgatgttcaagctggaaattccatcatcacc

SEQ ID NO: 304280 - DNA, 438 bp, Glycine max
  unsure (1)..(438): unsure at all n locations
ttgagccgagatnctgactcactgtataccttgagccagagtgttattgttgatccttaccctcggaagcaaatgagaatagaggggagatttccaatccnagaataagagaaggagaatttgcactgaatgcagatcaagaaaagaaggagaattccccaatcaaagagtgcgataaagcaacaaaagataagaaggaaaattccccaatcaaagagtgggagaaagcaaaaagaagagaaaggaaaattctcaatcaaagaatgggagatagtaaaaaaggaagaagaagaaggaaagaaagctcctgatcaaggatcgaaagaaaacagaagatatgtgcagagaggtctttggaccggacaatatctgaacaatacagaattgcaccaaatgaacgaaaanagaaggagagggaaccacgacctaaaatagtct

SEQ ID NO: 304281 - DNA, 422 bp, Glycine max
agcttgtctcatcgtttatgcgagacagagaccaacatgttagccatcgtcagcaagtaccaagaagaattaaatctagccacaacccacgagcataaagtggcggacgagtatgcccgagtgtacgcggaaaagaaggctagaggaagggtgatcgactcgttacatcaagaggcaacaatgtggatggaccaatttgctcctaccttgaacgggagtcaagaacttccttgattgctagctaaggccaaagcaatggcggacacctatttcgtccccgaggagatccacggacttctcatctattgtcagcatatgatagacttaatggcccatataattagaaaccgctaggaagtttgactggcactcagatcttgactagttataaatttttaaataaaatgagtttatcccatgtt

SEQ ID NO: 304282 - DNA, 489 bp, Glycine max
  unsure (1)..(489): unsure at all n locations
nggttcccaacgctttgttcanactctcccanaacctagaggttttatagaatctctatcagacactatgctagatggcacaccatgtaatctgacagtctcactaatgtacagggaggtcaacttctctaaggaaaacctaatattgatggggataaagtgtgtagatttggtcaatctgtcaacaacaacccaaatagaatcaaaacctttgggggtcctaggtagtcctacaacaaaatccatggggatactatcccacctccactgnggtatctctaatggttgtaacttacctgaaggtctctgatgttctatcttagccttctggcagactaaacacgtatacacaaactcgttaacctctctcttcatgttgggccaccanaacattatctttagatccggattcatcttggtagcaccaaggtggatgctcanngtgctcctatgaccttcctctaagatcatcttcctatgttcggcaca

SEQ ID NO: 304283 - DNA, 407 bp, Glycine max
agcttagactgagttcatcctaccatcctcagactaatggccaaactgaacggaccattcattcgttggaggaccttttaagagcatgtgtcttagagcagaagggaagttgggagagttttcttccattgatagagttcacttataataacagttttcactctaccattagcatggctccctatgaagctttgtatgatagatgatgtacgacacccctatgttggttagagcccggagaaggcctcaccttatgaccagacgtggtacaacaaaccactgagaaagtttagttaattcaggaaaggatgagaactgctcacagtacgtagaatagttatcatgataagaggaggaaagaattggaattcgacgttagcgatcatgtattcttgagagtcactctg

SEQ ID NO: 304284 - DNA, 496 bp, Glycine max
  unsure (1)..(496): unsure at all n locations
cctgaagacacagtaatggcaaggatgctnttgttctcttgaatctctttngggtcaatgccaattaagtccaatgaggcaaagtaaaaattgttgtttcaaaaagaataaagggtgggaaatgcaaaacaactttgtcacctcaggagaagctttacatgatgaataaaaagagaaaggaaagacattcttgccttataggaaaaagttgattgggatctacgtcaacattaatggatttagtaggatccttagtactttttgatatcccaattctacattntttcactagttttggattgttttatttgctcatgataaaacaatttttttggtaaataatccatgtacaaaatttggtgtttacaacaatatcattgtttgaggattttnttttgctttagaagaaaacaagagttngcaattccctaggagataaatattttgtgtaatttttagttatatcatatctacttacaaaccctanatatctact

SEQ ID NO: 304285 - DNA, 361 bp, Glycine max
agcttgtatcttaatttagaattcctctataataaaggtgattacatcaatccttttcattttttggtggtaaagacggctttatcccatcaatcctttttctatatctatcataataatgatccgggctcctttgaatattttacaggaaagaatctatctcacctgtaatccgatatcgcaatcccgcgatgtgaccgttttatttcatataaattaattccttcttttatatgcgcacatacaagagatgggttagccgtttttttcttgcacaaaagtaaattaaaccattatcaccagtttagcggctgtcgccaccttcttctacctctaccatatcccatcactgccacaatgc

SEQ ID NO: 304286 - DNA, 303 bp, Glycine max
  unsure (1)..(303): unsure at all n locations
aaataactgtcataaggcgtgaacctatgcatactacccatcatatctctcanaacactatacccacgaaccattatgtgagatgatgtctacccaaacctgatatgtgaagtgccacgatggagagatgcgctacacgactccgaacatggctttctttcgcgattgggagcagacatggtgtacaaaggttggagctctgatggagcttcaatggcgatgaagaagaaaggaatagcaacgtgagaaagagagggagaatagcttctgaattcttggggctgagtgaggagagagagaacg

SEQ ID NO: 304287 - DNA, 426 bp, Glycine max
agcttatgcgcatatttccttacgaacgttcacttgcacaagacatcctattaactaagaaaaatgcacccatatacaatcaaggtagcttcattacctagattatttacatgtacttccaaggtgtatttgttacttacatcacacacatctccttggctgaatttacatacatgcatactcaaagcattttggggtaccaaaaattgcacatgcgctcatcttggtatttctaatacctatacatatacaaacttcatgatgaatcttgactacctacacaataaggtgctacatttcatgcttttttttcaagtttttgctacctaaagccgcatgcaaattcaagcatattttccttcactgactaaaattgtattcaaaataaaaggtatatatctctttgtaatatgctttcttcacata

SEQ ID NO: 304288 - DNA, 411 bp, Glycine max
  unsure (1)..(411): unsure at all n locations
tgtcatcgattaccagaggacattntcagaaaattatttctatgagtcacaacttttcaaatggctcttacatggccatcaaaggtctatttatatgtgacttggaacacanatttgctcacaatttttcagaacaaaaaggttttatcctctcaaaaagcaaaatcttcttatcctcttaagattccttggccaatacacttgcaattcaataaggatttatttgagtgctcaaattgttcaatctatctctttcaagagagatttcttcttctcttcactctaattctcanaaagggattaagagaccgagggtctcttgttgtatagaaatctgaacacanaggaaggattgtccttgtgtggttcagaacttgtatagggatttacaagatagtggaactctcaagc

SEQ ID NO: 304289 - DNA, 402 bp, Glycine max
  unsure (1)..(402): unsure at all n locations
agcttctatattagctgaaccattatatcaataaacacaagttgagttttattcagaanattagagcttatctcttttatcttagtgagagtgattctcctaaattcttgagtgattcaagaacaccttggctgtatcaaaggactttcacaacctttgtgtgttgccctcgctggaaagagtgattctttccttcctttcatcatcacccttgttctttcaacccacaattccaaaaaatccacctctgcccagaattatctcgtggccataacttccattttacgcactcaaattaagtgattcttgagcctaaattgaatttcaatacgagacctttcaactcgttctggaatcacctcatttggagcccttgtagcttccagtattggcatatctata

SEQ ID NO: 304290 - DNA, 342 bp, Glycine max
  unsure (1)..(342): unsure at all n locations
gtggttntcaattacgagtgtcgcgatatcctacgggactcttttgacatccgaatcanaagttattacgtttgacttttcctagagctcccgttttcaatttctagcgtctcgatatattaaggggctcaatcggacatccgagttaaaagttattgttgtttgacttttcttagagcttccgttttcaattttgagcgtctcgatatattacagggctcgattagacatccgagttaaaagttattgtcgttagatttttctcagagcttccgttttcaattacgagcgtctcgatattctacgggactcagtcggacatccgagtcaaaagttattgtc

SEQ ID NO: 304291 - DNA, 392 bp, Glycine max
agcttcatcctcagatccctcttgttggactaggcttaatttagacagccctcataggtttagactaacttaaactaagcttcgtccgcagatccctcatttaagtctaggctcagcttacatagcttacgaaagtttagactaatttaacttaagcttcgttcgtagatcccttatttaagactaggcttagatcaaacaacattattgtaacaacatatttgaaatcaaaacttaatccgcagatccctcatttaagactaagtttcaatcctgcttcaatcatgttctaaggtagcagtacatttcccaatgctaaagtcacctaactatgcacacaaatgggtgatcagaccaagagcatatagaatttaagcactcgaagaagcatt

SEQ ID NO: 304292 - DNA, 368 bp, Glycine max
  unsure (1)..(368): unsure at all n locations
tgtccatgaaaataagatattgaagtatgtcatttcaatttctgactacgtgaactggatcatttttaagatccaacgccttaaaatgatcacctcttatgttaaagataaaaatcacttgataagcaagaactacgtaggtctgatttcctcatcacaattgatgatacgtaggagcataaggcccgcttttgttgaccaccccgagagatcgttaatggtccaacgccttaacgtttctctcctttctgaatcaaaagatcgtttaatggtccaacaccttanatgacctttttgttcaatcagaatatatcgttgccaaagatgaataaacaacttaaccaaacactcttgtccgaaagaactac

SEQ ID NO: 304293 - DNA, 422 bp, Glycine max
  unsure (1)..(422): unsure at all n locations
agcttccatcatgagatatgatgtagaaccactccatgtagtccaatacacactgtccaggagcaatacaaatctgacccaccggtgcaaggtatttagaaaactaaatctatctatcatcaatatcctctatagataaagatggagcaacaaggtgtggaggaatggtctgcacataaccaaattgtcacaaccctctttagcagtgtcgtctcgaacatcttcggngcccgaagcaaaaactaaaaaagggacccctaaacaacggaaacgtatttcataaataattcattgacaaaaaatttcatgaatttataaattcaaccaacaaaaaataaacacaaaactcttgtatattataaagttcaccacaataaagttaataattcttttccagatttctaaaagttggtaagcccctc

SEQ ID NO: 304294 - DNA, 478 bp, Glycine max
  unsure (1)..(478): unsure at all n locations
tacaacgtagagctaatacagttgtcaactcagaattgactctctaccaggagcaaacaagtacatatactattgttatcaccaagtccaagtagtagaccaacaaattgaaaattaaaatgttatttggctaaggagtaatagaccaatagaattggttaaatacatttagaatgactatgttattcggtaattcctaataaaaaagttaaagaatgaaagcaataaaccaagttcaacacttgaactaaaatggtactaattcattgataaaaatggtaccttatttgataggtcaggtctaagcctttacaaaataaatgaaaaaaaaaacaaaattaaacttgagttaactcggttggcacctcctcaataggtatttaagcttcattaaccaattccccttgatgatcaacgtctttgtcaacatcaaagaaggaaatatcaacatctttcanaaataacttaacttgataga

SEQ ID NO: 304295 - DNA, 325 bp, Glycine max
  unsure (1)..(325): unsure at all n locations
agctctccaccatacccaacaatgtcattactcagccaataaacaaacctcctccttacccaccacccagttattcacaaaggccatccctaaatcaaccacaaagtctgtctaccgcacttccaatgacgaagaccacctttagcacaaaccacttgtaaaaatatcaacattgaaaaatataacctcccacaaaaaggaattntgcagcaaaaagcctgtagggttcaccccaaattccgttgtcatatgctaaacttgatcccatatctacttgataattcaaatggtagccataaccctagccaaggttcatcaacctcca

SEQ ID NO: 304296 - DNA, 390 bp, Glycine max
  unsure (1)..(390): unsure at all n locations
ntataagcgcgggttcgggagacanaggtcaagcgttcgcgatatgcgaagatgatattccgagtactttggatttggtacgaccatgccctcctgatttccagctgggaaattggcgagtggaggaacgccccggcatttacgcaacaagcataatgtaaacctttacggttntaaaagctctatagttgggcctaggctttagagattttccttttgtaaggctttgtgtcttttgttcttgaatttataatacaaggatctttcttcatctgttcctggtctctacccattctcattcatttgcatgtttacttctttttctgaaacggcagatccgatgacgagttccccgaaggtactaatacctgtgacccgtctatcgacttc

SEQ ID NO: 304297 - DNA, 419 bp, Glycine max
agcttctcatagaagcttctcaaggaagtttctcaagaaagcttctcatggaagcttctcaaggaagtttctcaaggaagctacctaggctataaatagaagcatgtgtaacactttttgtaactttgatgaatgaaagtcttatgagacacacttcaaagttccacttctctccctctcttattccttcaatttcgtgctccccccttctctctttcttatcctccattaaagcatcctcttcaagattcttatccaaggcacattcttggtggagaagctccttcttccatggcttatttcctagtggatgaggactcccctctcttcttctcctttgccttccgctgcatctccatggtggaaaatcaccattgaagaaccgcattgaagctcacagatccagcctccatagaagc

SEQ ID NO: 304298 - DNA, 318 bp, Glycine max
cgaagtgagagagtgtggaagagtcagtcttcctacttttattcgttgaccacagagtggtacctgaagatatgtctcgagggtcaagagaccttggggacgtcaggtggtgtgttattgcccaaaaccaagcttgaccaatcccgacccaacccaggcatagtcagtcagtgagaacctgtgacgtacctagacaggcgagctcctggcagtcaaccgataaaagaacacagaccacaaagcaaggaggcttgtgtggtggcatggcagctatggatcttgagtgatatttgggttatggcctctggtaatcgatta

SEQ ID NO: 304299 - DNA, 415 bp, Glycine max
  unsure (1)..(415): unsure at all n locations
agctcttggcacaaagaagaataagaagttcacagagattcaaggcttgtaaaggactgtataagattgattggaaaagtgtattaaaaagcaaatcaaagccttgcttttatagactcttcatgtctggccaagaggatcatttagaagagttataacttttagaaaaacttaaaaccaatttgaaaaagtcaaaaaaccatttgaagagttacatcttttgatttattcagaaacaatcactggtaatcgattaccaaatcagtgtaatcgattacacaaaacttttatgtgaaaggatgcgactcttcacatttgaatttgaagttcaacgtttaaaggcactgataatcgattaccanaacattgtaatcgattacaactttttgaaatcaatgggagcgttgaaattcat

SEQ ID NO: 304300 - DNA, 484 bp, Glycine max
  unsure (1)..(484): unsure at all n locations
ntcggacaatgaagaagaagaagttcaaagagattcaaggcttgtctatgattgattgaataagtgtaaaaatgtatttaaaagcaaatcaaagtcttgcatttatagactcttaatgtctggccaagaggaccatttagaagagttataacttttagaaaaacttaaaaccaatttgaaaaagtcaaaaaccttttgaagagttacatcttttgatttattcagaaacaatcactggtaatcgattaccaaatcagtgtaatggattacacaaggcttttatgtgaaaggatgtgactcttcacatttgaatttgaatttcaacgttcaaaggcactggtaatcgattaccacaacattgtaatcgattacagctttttgaaattaattggaacgttgtagattcaatatgaaaactttttcagaacaattctgctattggtcatcgattacaacaatttggtaatcaattaccagagagtaa

SEQ ID NO: 304301 - DNA, 430 bp, Glycine max
  unsure (1)..(430): unsure at all n locations
agcttatgcgcatatttccttacgaacgttcacttgcacaagacatcctatcaactaagaaaaatgcacccatatacaatcaaggtagcttcattacctaaattatttacatgtacttccaaggtgtatttgttatttacatcacacacacctccttggctgaatttacatacatacatactcaaagcattttggggtaccaaaaactgcacatgcgctcatcttggtatttctaatacccatacatatacaaacttcacgatgaatcttgactacctacacaataaggtgctacatttcatgctntnttnttttttcaagtttttgctacctaaagccacatgcaaattcaagcatattttcctttgctgactaaaattgtattcaaattagaaggtatatattnttttgtaatatgttttcttcacat

SEQ ID NO: 304302 - DNA, 405 bp, Glycine max
cgcatcatcccgtttcagattctatacaacgattaatacagattgtttgcattaatcggtgtattgaatcttgaattgtccgtttggacagtttgggaagactaatttttaatagtagattattatgtataggttaattctcttttcttaaatttgtcaacatttcggtatagttcatttccctttgttcttcgagttcatagttgaatatggtggataatgatatgccaccactttcatgttgtgtacttggggacttagccgaaatgttgccgaaattttgacaaatatagaaaagacaattaacttgtagcattcaatctactaataaaaaatttcttcttgaatgggttatggccacacctttaattaacaaagtgagggttacatgcacgtatataactc

SEQ ID NO: 304303 - DNA, 360 bp, Glycine max
agcttcaggctgctcaattgctccaggatgctgcatggaagggcaaaggtctgtatggtggtcagcagaggagcacaaaccacaaacccttgcgacaggtacagatttctgattcaaggccagctgggttaccaagttgaccaacgcatccagtttgccttcaagcttcttagtttcagatgatgcagatgggtttgtagctacctcatgcactcctctaatgactatggcatcatttctggcgctaaactgctgggagttggaggccatcttctcaattaaatatctggcttcagcatgagacatggcttcaagggctacatcactggcagcatctatcatacttctctgcatattact

SEQ ID NO: 304304 - DNA, 303 bp, Glycine max
cgaacgccggccatcgtcgtgaccacggtgggtgcactgacaatcgtgttgtcgctgaatccctgtacttgcatgtggagctctggtcccaccgtcgaggtggtgctatatggattctgcaactcggcgtttggctctgccaccatgacctccacctcctcaccagtcatccacgcattgctggtaatcccgtttagcgtaccgacgtcactatctgcagagtctaattctttacatgagccatactcactttccttccggccatagcaagggcctgaattgctgccatcttctattacaata

SEQ ID NO: 304305 - DNA, 427 bp, Glycine max
agcttcaatcacattgtgtgctgctctgacctctacgtctgctatgtattcctacaataaacaaaagacagtgtcatttttagacaaaattctgagattcaatgaacaagtaataaatcttcgcacaagtacgttttggtcaaactttcataaaataacattattaggatggacctaattaaagtaaccatgctataacttttcttcaccaaatctttgcttttgctcagaaagtcgggtctaacattgcatggaaaatggaaaattcgttcctggtgtttgtgatacatatatagatgagattaatttactaaaagcctaatatatatcaatatcactagcgaattaatatacatttcagtggacaatatgtattggaattatgttgtaatacctttcgtctaatatatgttaacaaataaactat

SEQ ID NO: 304306 - DNA, 445 bp, Glycine max
  unsure (1)..(445): unsure at all n locations
ntgagccacaatcctgactcaccatatacctttgacccaggtgttaatgccaatccttaccctcggaagcaaaanaagaatagaggggaaatttccaatcaaagaataagagaaggaaaattttcaatgaaagcaaaaaagaaatgaaggaaaattccccaatcaaagagtgggagatagcaaaaaaaggaaaagaaggagaattccccaatcaaagagtgggagaaagcaaaaagaaaagaaaggaaaattcccaatcaaagaatgggagatagtaaaaaaggaagaagaagaaggaaagaaagctcctgatcaaggatcgaaagaaaccagaagaaatgtgcagagaggtctttggaccagacaatatctgaacagtacagaattgtcaccaaatgaacgaaaaaagaatgaaagggaaccacgacctcaaatagtcttctcc

SEQ ID NO: 304307 - DNA, 512 bp, Glycine max
  unsure (1)..(512): unsure at all n locations
tcgcgctctacctacctctcttcccactaatataggagtactactatgtacacactattattgtaatacaaaacanncatacagcngnngcctgatgcatcatactcacggcaacagccggaccgggaccttagatcgactgcagcagcaagctagaaaatttatttccgctgttatactctgtaaagagttgttattgtgcgacttattttcccattcataaagctaatagaacaccctaaactgctctaggccataatttaaaagactgtactgctaagtgattcatcctgaatacgaaaactcaagtggttgaaatgacaaatgacaccatgcaattaattgacctgaaatttcaattattcataatgcaacaaagaaaactacccgacatcctcttagcgaaaaggcactacccacttttgggtgaccataaaatatcatactgtggcctattcgtaactaccattaaaatacattttaaacccactgtcttatccatcaatcatacg

SEQ ID NO: 304308 - DNA, 421 bp, Glycine max
  unsure (1)..(421): unsure at all n locations
agcttaattgactgacactcattgggtttaacagcagcagtaatgaatttctcattgggtttaacaacatcagtaattttgggcttaattgagtgacactcattgggtttaacagcagcaaaaaagatgaagcaaatgtaccttctgttgtactttatcaggatgagtgcacaatgtagctttcctataaacttttctaacagcagcaacagtaatcaaatcattctaacaaactgactgccaactacattcaggccacagcacctgataatcattcatgaaggaaacatgttaacacaacaaacatatcagttttgcaatgagcagtgtatatcanaccaatcatatcagtgcatatgaggccttatccaggctatgtgaggccttatgcacgctagacaanntttttaagttttaattt

SEQ ID NO: 304309 - DNA, 407 bp, Glycine max
  unsure (1)..(407): unsure at all n locations
gtacaattactatagattctanaaattatgttaatgcgaatgcttagtggcataagggattaatgtcctaatttaaattcttaccttctccatagctgttganttgattaanaaaaatacattttgcccacaaaatgaataattatgcaactaaataaagttgataaaaaataaaataaatntgagttaagcaagttgttgatgaaaaattaaaatataaagtttgaattaaatataataaagtaaatatgtaattatatattaatcatgctctttttntataattntacatagatattaaatggataggtattcaaattatgacattaagatcattcgtttattttggtagcttttaaaaaattatctttaaaataaaaattgaactaaaatgctattttttagtc

SEQ ID NO: 304310 - DNA, 417 bp, Glycine max
  unsure (1)..(417): unsure at all n locations
agcttgaatcttggtggngagatatcacccgccattggtgtcttgatcctatttgggacactgtcagagaagccaagttagaggtaccaataaaattggattattgggaagttcatggattgttctgttcttttttcctttgagtgtaaactgtatatagttatatgataattactgaactgacatacaataagaatgtgactaacttgttgttggcattcctgataattactgaattttgcattttgtgaaaccaatttttgcgtccttgagcagtggaaacccttcttttaatgttggttttcctttaactaatgttgatattntaacttggctctgctgtgtgaagttgataagaatgtagtgattgttaaaggatttcactaggttcggttcagtggcatgcacctaagtctc

SEQ ID NO: 304311 - DNA, 490 bp, Glycine max
  unsure (1)..(490): unsure at all n locations
ggctctanatntacattgatgtttgtatttatgggaggaggttatatgccattnttgctttaagagtagtatcccactggtaaaattaactttccaaatgtttgccttcgcaggaatggccccgaggaagcttgcctcatagaggtccaggaaggacaaggcggccgaaggaactagttccactccggagtacgacagtcaccgctttatgagcgctgtacaccagcagcgcttcgaagccatcaagggatggtcgtttctccgggagcgacgcgtccagctcaagacgttaaagaagcgctactatgaggcaacctagtaccttntaaatttctgcctgctatttgatcactntttatagtaggaacgcacctagtgctcatgatcctgngaatntaaataaaacaagcgcaagctcggaaggtagtcatacctcacanaatatatatatngtatgttaggtagaaagataccttatatatgcatgtat

SEQ ID NO: 304312 - DNA, 360 bp, Glycine max
agctttattgactgtgtgcaatcacacattttacatagagtgtcctcattgatatgtttctacagttggttttgcataacattttaattgtcaaaacatatgattcatggatatgatctaagcattctttctttctttacatttttaagccactggccaaacagctatccccaatgtatattatctttatcatttgcaagccctttgagcaaaacacttgatattttattgtgaccctaacctacgataaaatgttcctacacttgatacttcactatgcatgctcatatctttcgaagcatatttattttagacttatactagagatatttgtaatttttctgcactttgcttgaggac

SEQ ID NO: 304313 - DNA, 191 bp, Glycine max
ccccccccccctcccccaaaacggagagacgacgccacgccccaccccccacgcgcatgagctcgatacacgaataacaacagccgcgccacacgacacaaggagagcgcttatatgacgccgacgccgcacagacaggacacaggaacacccagggcagaaaagagaaaccggtgacagcacaacagcca

SEQ ID NO: 304314 - DNA, 226 bp, Glycine max
  unsure (1)..(226): unsure at all n locations
agcttgtgtctttcttnccgccccatactagcaaatcgaacaccatccaactatagggaaatgtcaccatgctctttaaacctctccataataaatgccttcactacttacttcactaccatgggatcatcaacccatctcctttcttttacaataccttgaatattattactcctcctccatttcaccactttatggaaataacaagtgctgtcacctccttcct

SEQ ID NO: 304315 - DNA, 313 bp, Glycine max
taatatgcatacaacaattgacttactagctgattgaacttgttgatgaggtcataaagacctactaccatctgcattttgagttgatactactccatcctcagatagaggcgattagtcgatcggttagtgactctgacgcatagatattcttgagcttctaccacaagaccttctatgatgcttccttcaacacgagttgttgtatcttaagagcgaaggctaaccaaatcagactcaccatactcctttggacatagaccactccgtttgatttatagaagctggcaattcttcttctaactcctgaaca

SEQ ID NO: 304316 - DNA, 297 bp, Glycine max
  unsure (1)..(297): unsure at all n locations
agcttctaatgctctgtgctgcaattgcagcactgccacagttgctttctcttctactgatagagaataattgagagaagatgatttgatgtcatcaaaggaaggccatcctgaagttgtagaagaaaaaccagccttggggctttcactttcccactcagcaccagaaaccagagattcatgagattcctacattcaattntcattagtaacaaccaacaagaagtaaacatatatgggagttgggatttgctagcagacaatattactattccaattntcacaaatttgaagaaa

SEQ ID NO: 304317 - DNA, 475 bp, Glycine max
  unsure (1)..(475): unsure at all n locations
ctgattccaaatggaacttctcttccactgagtcctccagctttttctgaaatagagttttggcagcctcaagttctgatatagctacttccttgtcatgtaaaatggtagtgatgtattcctgttttttagcctcagaacgagcaagttcttctagtaattgatccctctctttctcaataatctcttgtctatgttgagcctccgaaagagctattttggttaccactaattcatcttctattcctataacatcatcttgatcaacaactacatctgtgagtttgtcatctgaatcattctgtcacacaaatagaataaatatagggtcactctccactatcaactttgtaatttgcacctacttaatataatatcattaatagatatgtgaaactcggtcacctttctgaaaccagatactcaanatggccagcctcaaaatcatgtatttcataaagaactagatataagt

SEQ ID NO: 304318 - DNA, 324 bp, Glycine max
tctatggaagctggatctttgtacttcaatgagatgcttctatggtgattttcaccatggagatgcaacggaaggcaaacgagaagaagagaggggaggctccatcccctatggaataagccaaggaagaaggagcttcaccaccaagaattgccttggataacaagctcgaagaggatgctttaatggaggaaaagaaagagagaaggggggagcacgaaattgaacgaatacaagagggagagaagtggaactttgaagagatactataagactttcattcatcacaggtacaacaagcgctactcatgcttttatttatag

SEQ ID NO: 304319 - DNA, 451 bp, Glycine max
  unsure (1)..(451): unsure at all n locations
ctacatggagctacatcaggaagggaagccatagcaatgatgacattangtaaagaattgataaacaatgttgacaagatcattgaggccgaagaagaaatggctaactccatgtgtgtaattgagttgaatagacaaagtacatttttcttggtggaacaattactaaatccaagacaatgatgtcttccagaaaaatttgctataaacatttcttaataatggtgtaattgtggtaaattataaaaattacacatgtcatgttcacatgcaattgcaacatgtaagtatgtccatgttgattacaaatagttaatcaatggcgtttacaagctcaattacgtgtccaacgtttacagcagactgatagagcatttttagttcattaatatcctattcttcttagcttattcgacctttctttgactcttattctctcagcttaattcaa

SEQ ID NO: 304320 - DNA, 361 bp, Glycine max
gctctcactaagctcttattgtataagtgctcaactaaactatatattcatgttcaaatactcaaagacacctttgataaccttaaaatgggaatcctcaattgaatttcaacatattatgaactatatcgtatgcccttacaattttattctaacaagcctctggccctttatgtgtatcttcatcccaactgcccataccttcataaatatatacaggatatagtacctatgcacccattgtttatttgcatttaaactagaaaaagtacaccttagtatttactactacgaattgaacagggaaaaataatacaaaattacttacatgacactcccttgatttgaatctatcacaccc

SEQ ID NO: 304321 - DNA, 394 bp, Glycine max
  unsure (1)..(394): unsure at all n locations
nggaaacganattacctcactgggctatcacggcatgatgctattactctcactactaaactagaatatgattcgagatagaaggtaatgatgtataanaccaaaacttactatctccaacttccttttgttgttttccttttatccggcgagaacaacactggctcttgaatgttgaccttgaacagtagcaggaccagcacacattttcaaagataaaaaanaaattatatatatatatattgaactgaagataccccaccaccatggtggcaagtcctacgtaaacatatttctgttgacaaagacaaaaaagggacctttccatatgttntcacttttatatatatatatatatatatatatatatatatatatatacaactaataaccg

SEQ ID NO: 304322 - DNA, 71 bp, Glycine max
agcttctatatattgtgctatatattcaatatctatcttgtgggacccacattatacacatgcatatactc

SEQ ID NO: 304323 - DNA, 410 bp, Glycine max
agcttccccgattactgtcaaaggccaaagcaatggcggacgtgtactccgcccccgaggaaatccacgggctcctcagctattgtcagcatatgatagacttgatggtccatataattaggagtcgatagggagtttgtattgtcattcagatcttggctagttataaatttctgaataaaatgagtttaccccatgattttactccaaaaaatcagcgcgaatcaaatcactcccacactttatctctagcatgcattcattcttcactacgtactccttacatttggtctctttaggaaagacgccataactaaacgcgccccaagggatccctatcgcaccatatcctaatcaaggacgatgagtaacctacaggaagcgcaggaacatatgaaagtcgacatgtc

SEQ ID NO: 304324 - DNA, 479 bp, Glycine max
  unsure (1)..(479): unsure at all n locations
ctaataccatgttaatcaccaactcttctaacagcttaagctattatgtgggttttgtgaatgataatgaccttattacatctgcggacaagtgaaaagggaacaagacaaaagggataccgaatggttgtgtatgtgccgaatactagcactaggcttacaaagtttcacacaatgcttatttgcttccagtataagcacataaagctcctcctgagatatataagaagccatggcattcttttagaaaagtggcaagcaaaaaagagggaagcaatatgttgatttaaaagttaaaaaatcaaagcaacatggggatttagcatttttattttatgcttgattcacagagcatgaacaaggagaaaaaactaagcttcatacatgtttatgtcatagtataccacattcattagatatttccatccccaatgatgggcaggtgcaagctttnggccaagtagataccttaaagagca

SEQ ID NO: 304325 - DNA, 366 bp, Glycine max
  unsure (1)..(366): unsure at all n locations
agcttccatcaacacatttgcatgtaggaggaatagtgaattgtgaagatgacatttcaggacctcgcattcttgctctctctctctcccacgtaagattctcctctctctctttattttattntatcaaaatggttgggattaggtggaaaatcccattttcgtaggcccacatcgtgttttctaatgggagttgataatggtccctactaaaattgctattggtccttacaaaactttaaaatttgaggaaaaggccaatttaccctctattcagacactccacccctccttcccccttcttcttactatggcttatgttcttctcaaccccatgttaaatatacaatggaaatacaattctat

SEQ ID NO: 304326 - DNA, 487 bp, Glycine max
  unsure (1)..(487): unsure at all n locations
cggatggattcagtctaactagggatcgaggtttagtaatttatgctacatcttagaacacaaaagcatgattgattagagaaacatctttatatacatcagctggtttgttagataaactcaatacctttacctattgctatcaatcttacttgcattnttactgtttttagcctatacttagtttaattatgttctaaataatcaattatcaatgtttctttcaacaatgctntatttatgaatttaaccctgtctaatactagctccctgagtgtgatactcagattcaatcgttttaattntaaatacttgacgatccggcgcgctttccggcaaatcggatttcccttgaacatatttgtataaagaaaaagtggaccataaagtaactgcaggggaaatccaacattgccccagtaagacattcctggaagaaatgcatccattaattttcatctttcgcgcatgcttccattatcctact

SEQ ID NO: 304327 - DNA, 403 bp, Glycine max
  unsure (1)..(403): unsure at all n locations
agcttagagttgataagtattctagcttacaaacttcattggatactggaacagctaaaggcttaaccaagggaaaaagagtcatcttaccctcaacgtttgttgggagcccatgttatatggatcaactttactttgatggtatggcaatatgcagtcatgttgggtctccaaatctttttattactctaacctgtaatccaaattggcccgaaattcgtagattactttcacctttgaatctcanaccaacagacaggccagatattgtatcacgaattttcagattaataaatataaacacatgctgtcagacttaacaaagggtcaattactgtgaaaagtggttgcatgtaagttgaccatcatctttatacttaaatacaaatataagttggtcatt

SEQ ID NO: 304328 - DNA, 464 bp, Glycine max
  unsure (1)..(464): unsure at all n locations
tacatatctatcttaagtccaagcccatagacgatatanaataatatctggacaagataagatgggatgaaatataatctggacgaaataaaatctagatagaataaaatttgaataaaataaaatctagatagaataaaatctggataagataaaatttgataaaataaagttattattattattattattattattattattattattattattattattattagttagacaagccggcttgtcaagcttaacaaacttnttttatggtttgagcttggcctttatatctaataaggctgtttaaaaagcttgagcttgacctttatagtaaacaagccaagccgaaccgagccttacataggccgagttgaaagccctcgacnagctgttcagctcattaccactcctaattataagtcccatgagcaagcctagtcctatataaatctgacaaaatatat

SEQ ID NO: 304329 - DNA, 178 bp, Glycine max
agcttgagatgatgaagtgttgaatggtgaaacttcctgcttttattgctgaccacagagtggtacctggagatatgtcgcgggggtcatgagaccttggggacgtcatgtggcgtgctattgcccacaaccaagctagaccaatccctacccaacccgggcatagtcagtcagtgag

SEQ ID NO: 304330 - DNA, 290 bp, Glycine max
tctcatgtagcaccacaaacctcattcttctgattactaagacaacttgatttcttcactttcttggcgtgcaaggcataacattgagctcgcctctctctttgatctttgactctatgatgaagcttcttcacataatcctggctgagcttgaccttatgtacgcgttcatgatagaaacattacgcatagcctttagatcacgacgagcctacggtgtctgtccataacctgcattagactgataactattaggttggctctgaacaccattatagagccaaccacca

SEQ ID NO: 304331 - DNA, 152 bp, Glycine max
agcttatcgcgcgcaatagtttctgctccttcgtgcttaacgccacgcttggcatctgcatttgcgtgctcgcttagcgtctgacgcgcgcttatcgccacttgtgggctgggcctgcttcacatttccttccttctcttcatttctattgc

SEQ ID NO: 304332 - DNA, 414 bp, Glycine max
agctttcttgagaaaacttccttgagaagcttctttgagaaaacttccttgagaagctagagcttagctacacacacccctctaataactaagctcacctccttgagaagcttccttgagaagattcctaaagaagctagagcttagctacacatacctctctaatagctaagcttacctcattgagatgagaagctagagcttagctacacacccctataatagctaagctcaccccatgacaaaaaaacatgaaaatacaaaaaaaagtccttactacaaagactactcaatagaatggccaaaatacaaggcccagatgaaggaaaaaccaattctaatatttacaaagataattgggctcatacttagcccatgggctcgaaatataccctaaggctcatgagaaccctc

SEQ ID NO: 304333 - DNA, 478 bp, Glycine max
  unsure (1)..(478): unsure at all n locations
gggagaggatgcttcaatggagganaagaaagagggagagaaatatggaggngggagcacgaaattgaaggaagacaaagggagagaagttgaactctgagttgtgtctcacaagactctcattcatcaaagttacaacaagtgttacacatgcttctatttatagactaggtagcttccttgagaagctttcttgagaaaacttccttgagaagcttctttgagaaaacttccttgagaagctagagcttagctacacacacccctctcataactaagctcacctccttgagaagcttccttaagaagattcctaaagaagctaaagcttagctacacatacctctctaatagctaagctcacctccttgagatgagaagctagagcttagctacacacccgctataatagctaagctcacccccatgagaagaaacatgacaataacagagaaagtccctattacaaagacaactc

SEQ ID NO: 304334 - DNA, 342 bp, Glycine max
  unsure (1)..(342): unsure at all n locations
agctttatgccaattcatacgacaataactntttactcggatgtctgattgagtcccgcaatataacgaaacgctcgaaattgaatgcttaagctctgagccaattctaacgataataactatctactcggatgtccgattgagtctcataatatatcgacacgctcgaaattgaatgtcgaagctctaagcctattcaaacgacaataacgttctactcggatgttccattcagtgacgtaatatatcgggacgctcgaaattgaatgttgaacctttgagccaactcatacgacaataactttttactcggatgtctgattgagtcccgtaatatatcca

SEQ ID NO: 304335 - DNA, 507 bp, Glycine max
  unsure (1)..(507): unsure at all n locations
tattacggacactatagatactcagctanacattcaatttcgagagtctcgttatattacgggactcaatcagacatccgagtaaaaagttattgtcgtatgaattggcttatagcataaacattcaactttgagcctctcgatatattacgggactcaatcagacatccgagtaaaaagttattgccgtttgaatttgctcagaggttcaacattcaatttcgagcgtctcgatatattacgggactcaatcagacatccgagtaaaaagttattgtcttttgagttggctcagaggttcaacattcaatttcgagcgtcccgatatattacgtcactgaatcggacatccgagtaaaaagttattgtcatttgaattggctctgagcttgaacattatattacgagcgtctcgatatattacgggactcaatcagacattcgagataaaagtattgtcgttgaattggatataagacaacattcaattcgagcgtctgatatata

SEQ ID NO: 304336 - DNA, 424 bp, Glycine max
  unsure (1)..(424): unsure at all n locations
agcttctcaagcaagcttccatcaacacatttgcatgtaggaggaatagtgaattgggaagatgacatttcaggacctcgcattcttgctctctctctctcccacgtaagtttctcctctctctctttattttattttatcaaaatggttgggattaggtggaaaatcccattttcgtaggcccacatgtgtttttctaatgggagttgataatggtccctactaaaattgctattggtccttacaaaactntaaaatttgaggaaaaggccaatttaccctctattcagacactccacccctccttcccccttcttcttactattgcttatgttcttctcaaccccatgttaaatatacaatggaaatacaattctattgtaaacttcgttaaaaaattaatacacaacgcanacatgatttt

SEQ ID NO: 304337 - DNA, 482 bp, Glycine max
  unsure (1)..(482): unsure at all n locations
gacctatgatactcagctggttaagcggaagaaaggataacagagactgacgagatgaagatgaaagaaagcaaaacaagaatgaattgaaagcctcggatttgaacacttaccggttgaagaccgaaggacgaaccaagaacagatgaagaacgacggaaaatcttcacaaaattgctcacagaaactgtagacaaaggatcaagctgaaagttttgatgatgccaaaggattacatgaatcacatgcttctcaaagatttactcaagacaaagcaattagagatattcaagatggatgatcaagacagtctatagagtcttagaaagggtatattaaataggaagggaattccaattgaagtagcacaaggtttggccaagaattntaagttanaaagtctttctcaacanatntactctctgngtaatcgataccagaggatgtaatcgatttaccagtggcanaactgatttacaaca

SEQ ID NO: 304338 - DNA, 423 bp, Glycine max
agcttccaacttagagatagagatcattgtaaaaggaagttctggggtaaaaagtaactataagcaatctacggtgagcttatccagcgaatcaaaacaggaacaagaacatgtaaaaaataaagttgaaaatcagggtgctggtaatattccaagatacttgaatcttgaaccatcacttgcaatggattggcttgagataccatgggatgatttgcgaatcaaagagcgtgttggtgccggcaaattttctgcttcttctgtttcctttttaaagaacatgactgatatgccaaatcttaatactcttcgctatgtgtaggatcatttgcgactgtgtatcgtgctgaatggcatggatcagtaagttttgaattagttcttctttgctgaattctatgcatgtacaagttcatgaatatt

SEQ ID NO: 304339 - DNA, 449 bp, Glycine max
  unsure (1)..(449): unsure at all n locations
ctgtcaagtagcatacatggtaacggagttaggatgaaggaccattttcacatattttctaaaattcgaggatcaaaaccaatgaaaaataaagattaagggccaaaacaaaatttaatcaatttttttagaaccaaaacatatttaatcgtataaattattttaaaaaacttaaaaatcatcaagaccataataaaaaatttaaaattacatttaattctattttaaaaaaatatatatgtttaagccttatttaagtttttgcccaccaaagaaaaatgttaatgtgagtnttatctatcatcaatttagccctctattgttgaaaccaacgatgttaattttatgattgaaacaatggtcttgcttgacactaattaagaaattaanagagatacaattatattaaaaattatgtgagagcaatggtataataatcgattcagttc

SEQ ID NO: 304340 - DNA, 404 bp, Glycine max
  unsure (1)..(404): unsure at all n locations
agctttataaacgccagctaaggtagatagaagttgattgtatccattaattaattattctttggattcgaatattacctcttcaccatcagagttgacagtatcatctagttgagagtcctcatcatctgaacttgtgtccagtgttaggtctactttgctggtggacacatcagccattagacatagtttggcttgttcctcactgtcctcatcaaatgagggatcgtctaagtcatcccaagtgctcaggaggctcttctttttggacttgaagaattacatcttcttatctgttgctattcaaggtcaagatatttcaacttcaagtgccctgngttcttgcactcatagcaaatgattggaattttctctttcttgtggaaggatcttttggacaattc

SEQ ID NO: 304341 - DNA, 487 bp, Glycine max
  unsure (1)..(487): unsure at all n locations
tatgcgcatatttccttacaaatgttctcttgcacaagacattctattaaccgaaaaaatgcacccatatacaatcaaggcagctccgttacctagattatttacacgtatttccaaggtgtatttgttacttacatcacacacatctccttggctaaattcacatacatgcatacccaaagcattttggggtaccaaaaattgcacatgtacacctcttggtatttctaatacctatacatacacaaactttatgatgaatcttgactatctacacaataaggtgctacatttcatgctcttttcaagtttttgctacctaaagccgcatgcaaattccagtatattttcctttgctgactaacattgtattcaaattaaaaggtatacatcttttgataatgtatcttctttacataacatgcaacacatttantgtatattntttgtgagacattntgactaccanaaattatatgtacataca

SEQ ID NO: 304342 - DNA, 421 bp, Glycine max
  unsure (1)..(421): unsure at all n locations
agcttggcccttctccttttatgtttcaaaaagtatagctagaacatgttaactatgaaaaggttattgaaaaaggttggagccattaatttgttggttgtcctatgtttgtcttaatatgcaagcttaaagtcataattatgaatctaaataaatctttctttggtgatattcatgataaagttaattcttgttataaacctattgaagttatccaatatgaaattagccatgntgtattatgtgatgcttggaaagacaatgatgctaaagcccaattagatcttgatcaagctctctcttgcatgagactctctggaaggaaatagctttgtgaaatggaattgccattgtaatacattctcatttcacatgactcaagtacatcaaacatcaaaacggtttctatacttcgtaatgg

SEQ ID NO: 304343 - DNA, 452 bp, Glycine max
tgtagaaagtgtctgtgataaggtgaacatcaagatctttatccttaccaattcttactcgttcaccaatgttcaagcaccatgttgcacttgcaacggtaaaaatgtcttcaatcacctatactctagccaccatgtcagtgatatgatccttgaagaggtcaacatcgagatctttatctcaaccaattcttactcattcaccgatattcaagcatcacgttcttgcgatggtagcaatttctacaatcacctatactccagccactatgtcaatgatacgatccttctctatcaatacatttctctaaaattctttgaacagttcaacaataataactttgcccttgttgaagaagttaacgatgtcatagagaacaaagttattcttacgtgcaatccttatgtcttccaacatgtttatgttgaactgatgttcaatatgaatcatt

SEQ ID NO: 304344 - DNA, 424 bp, Glycine max
  unsure (1)..(424): unsure at all n locations
agcttaaacaaaatatgaaccttctctcaattaaccctttgttcatttaattactaaaatagtttaccatagaactatagatctgcctagagaacaaggctcccacccactagggtagatatatgtagtcttaccctcacaagtgggaaactgtttccatgatttgaaccagtgacctccaggtcacaaggcagcaacctgattgttgtgccaagactcactctcatagaactccaaattaagaagtctgaacataccatatgattgatgaaagaaaggaaccaaaagtacataaatccaaggaacaaagcttaagagttaagaattttatgcaactaggtaacaataatcaattntaatatgttntatcattaaaattataattattaatccaataaattaccaatcaataattacttaattc

SEQ ID NO: 304345 - DNA, 398 bp, Glycine max
  unsure (1)..(398): unsure at all n locations
cgaggaatcttagggaaccgctagagacgctgctatcactgccagactacacacatgagcccgcttagaggtaagggatgagtntatcgcaattagggttagaatgaacatgtgtaaggatccttangggattaaattgaggcttattttgggatgtttattgtattgtaatttttcatgtatgattataattttgagattgttatattgggatcatgaaattgtgattgaaattatgtgtaattgataaattgcatatatgatgaattattagataacatgttgctttgagatcataacattgttattgagactgagtattagttcaaagtgttacatgtgttaatttgtgagatactacgttacatgtgatggttgattttgacatgatgagatgt

SEQ ID NO: 304346 - DNA, 424 bp, Glycine max
agctttataatttgtattaacaacattcagaaactgctggtaatcgattaccatatatgtgccatcaattacacaatgcaaattttgaattcaaattttaatagctgttgtaaatcagttttggccactggtaatcgattacatcctctggtaatcgattaccagagagtaaatttgttgaaaaagactttttaacttaaaattcttggccaaaccttttgctactgcaattggaattcccttcctatttaatataccctctctaagactctagagactgtcttgatcatccatcttgaatatctttaattcctttgtcttgaatacagctttgagacgcatgtgaaaactatggcattatcaaaacattcagcttcatcctttgtctacaatctccctccggatcgatgaccatccacaatgt

SEQ ID NO: 304347 - DNA, 374 bp, Glycine max
  unsure (1)..(374): unsure at all n locations
atgaagtggctngacctttccatactgagtatcatggactgtattctcctacttttggaacattattttatctcgaatatctagacttgtcttcaaacaagtttgaaggttcaattcctcccaaattgtgtgctctaaggagcctcaaaacattgaacctttccaataactcgctggtgggagagataccaaacgaacttcatggccttgagagtctacaggattttcatatattcaacaatcacttgagcggtttgataccatcttgtgtagggaattggaccaatctgagagttgttgctgcttatgagaataattcctatggaacgtgtacaagtaaacttggatctatttatgagcttacaacacttaac

SEQ ID NO: 304348 - DNA, 414 bp, Glycine max
  unsure (1)..(414): unsure at all n locations
agcttgagatgatgaagtgtctaagggtgaaacttcctgctnttattgttgaccacagagtggtacctggagatatgtcgcgggggtcaggagaccttggggacgtcatgtggggtgctattgcccaaaaccaaacttgaccaatcccgacccaacccgggcatagtcggtcagtgagaacctgtgatgtacctaagcatgcgagctcctgtctgtcaacagataaaaggaacaaagaccacctagcaaggaggcttgtggtaattggccagctgtgaaacttgactgataatgtgagatatggtctctggtaatcgattaccaagggtgggtaatcgattacaatgcttaaaaatgaagacaggaggctaagatggtctctggttatcgattaccaaagcgtgtaatcgatta

SEQ ID NO: 304349 - DNA, 233 bp, Glycine max
  unsure (1)..(233): unsure at all n locations
tatgaaagctcttgagcatgtcgaatggtcatatctttcacacgacggtcagactcacgtgcataatatatcgcgacgctcgaaactgatcaacggaagctctacatacattcaaatggtcatacttgttactcggacgtgcgaatcatgggcataatatatccagacgcttgaaattgaacaacgcgaactcncgagaagttcaaatcggcataactttttactatgaggtc

SEQ ID NO: 304350 - DNA, 367 bp, Glycine max
agcttatccttatggcttgcctccggacttcactccccgtgccaccccagaagatctaagccaagcccctactttcgaggggcagctcccaccttatgacgactatcccgggcaagacgatgaggaaggagatacccatctcggtcccctgctccacctcaaagatctgtccccccatgaactaccccaaccaaacatagtccgccatatcccgacttcacccacactcgtaaaagaatctgtttccttcgtggaagataaaggaaagattgacgtgcttgaagagaggttgagagcagtccagggcctcggcaattacccattctcggatctagcggacttatgtctcgtacccaatatcgtcatt

SEQ ID NO: 304351 - DNA, 397 bp, Glycine max
cccttaggcacttgtctatctttcgaatatgcttggacaaactgctgccgtgaagaatatccaagccgaggcgctttcgaaatgtttgcgtaacgttgtcgtgaggaatttctcgaaagtttcgaccgttcttcgacgctcttcattcgatcttcatcgttcttcaatcttcaacgggtaagtacctcgaaccaagcttttcgattcattctatgtacccgtggtggtccacattgtgtatcgtgaattgctattctgcgttcatctacttgttataccgccttttgacgtgcttacgccatattatatacatcatttctcgcttagcctgataataagataaatttccaccgatcgcttgaattgtattatccgctaactacggcttatatgaatt

SEQ ID NO: 304352 - DNA, 419 bp, Glycine max
agcttccgtctgtttggaatggaactgctacggaagattcagaatttgcaccttctcactatcagctgccaaaaacagtggtgaacacctagacttgttcaatacatggaccatatctttatctctttgtaaaatgacttcaaccacattaacatctccactatggacagcctcatgcaaaggagtgtccccaagatcattcatctctattgctatctttctatctttcatcacatcatcatgtgttgacttcactaatgcatattgtgaaacaatgacgttgaccatagtcgtgctcttggaactcaacacaccatgaagtggagtgtgacctcttacatttcccctaatacgaagtgcatgatagcgacacgacaatcactctactatcttttctgtcccttaactgctgccacatg

SEQ ID NO: 304353 - DNA, 368 bp, Glycine max
cttcactaactcagaatagacaggtaactgtagagacatgaatgttatatgattggaatttcaaatgcttggaagcattcaacattctcatttgagaagaactccatatctatgaatattgggtctacaatggaacgagaggaatagaggtttgtgtaccatatacgctgttcctcttatgagaataatgacccatagggattgcagggaggaattggagcttcctatgacccagaatgccgatgactccgactcgaagttgctttccgccatttgaagagttttttcgggatttctatcggttctaatgatagagatcgatgatagatgaacgttgtgctttgcggtgagtgatttcgacaagaatt

SEQ ID NO: 304354 - DNA, 389 bp, Glycine max
agctttatctagataagtatgatcagggtttttcacaaactgagtagcacatggatttttctcaaaacatgtttaccaaagagttttactctctggtaatcgattatcagattattgtaatcgattaccagcatccaaatggatttgaaaaagctttcaaactgaatttacaacgttccaattaatttcaaaaagctgtaatcgattacaatcttttggtaatctattactagtgccattgaacgttgaaattcaaatttatatgtgaagagtcacatcctttcttataaaagccttgtgtaatcaattacactaatttgataatctgattaccagtgattgttactgaataaatcacaagatgtaactcttccaaagggtttgacttt

SEQ ID NO: 304355 - DNA, 592 bp, Glycine max
  unsure (1)..(592): unsure at all n locations
acctcccgctctctcgccatatatagaataagagagttggcataattgtgtatctcccnnccccaccccgcgagcngtngatagtgcatcctactacnacnganctatanaaactcagcttgcgaagttgttggcttctatacctcgaaacttgtgctattcctccttttcattctcttcttcctgtgcgtaaaagaattcgccaaagactaaccgcctgaattcttttgtgtctcccttctcccttgtcaaagaattcaaaacgacacattctgagaattctcttgattcgctcctttcccatatacgcatgatctcaagggactaatcgcctgagaattcttttgtattctcatgcaccaagatgcaaaggtataaccgcctgagaactttgcttatcacattgcagggacatcctttgtggtacaagtagagcgcacatcttcttgggtatgactgagaacaatatacactacatcctcttgggatcatctctatcggaatgtccttccactagatgtccaatagaacatgtatggacactccttggcctcctttttgaacagattctcaagtagcaaaaatactactc

SEQ ID NO: 304356 - DNA, 423 bp, Glycine max
taaatatatttacatgtatcagatatatatcaaagtatacaaatacatatatatatatatatatatatatatatatatatatatatataataacgataataataaacacatcatgagataaagaattatatatataactacataaaagtagttaaacatattatagacattagatatatatatatatatatataaacatagacttatatatatatatatatatgtatatatataatatagataacaaccacaaggttatatacatatatgttaaatgcattctaaagaagatatgaaaatcctacagtgagagacaatatcttgattttgagcgcgtgagcatcatcacggagaattaatataattttttaagagttatttcaagaggtaaatacaatttgagagaatctatctgtggcagcg

SEQ ID NO: 304357 - DNA, 370 bp, Glycine max
  unsure (1)..(370): unsure at all n locations
ccagggtgctggaactacttcattttgacttgatggngcctatgcatgttgaaagccttggaggaaagaggtatgcctatgttgttgtggatgatttctccagatttacctgngtaaactttatcagagagatatcacataccttctgagtattcaaagagttgagtctaagacttcaaagagagaaagactgtgtcatcatgagaatcatgagtgaccatggtagagaatttgataacagcacgttcactgaattctgcacatctgaaggcatcactcatgagttctctgcagccattacaccacaacagaatggcatagttgacaggagaaacttgaccttgcaagatgctgctctgcgcatgcttca

SEQ ID NO: 304358 - DNA, 385 bp, Glycine max
  unsure (1)..(385): unsure at all n locations
agcttgcatctttattaatatagttaataaaaataataactatacaggagctacgcctctgttttactacaggtatactttgatttaattaatttttccattgtttctagtctaggaattaggatataaacatggttctaaaaaaagtatgtggccatcaatgtgtgtagatacactctaagattgtaaggagaggatatatatttgattctaaaagaatatattatggtgaagataattggagatccaactgaaaaaccacaaaatattaattactgtgttaaggatggtgcaaaacatatatggtgattacaatttacaaccattngaattaanagataattaaccatgtataaaagctataatacattaagagaatattaat

SEQ ID NO: 304359 - DNA, 489 bp, Glycine max
  unsure (1)..(489): unsure at all n locations
ggaagcccttagttntagttntggtttaataattntgaaatgtttaacatgtttaatagatgtggcaattgtcttgaatgttttagactangcatgtgtgtgatatagtctaagtctttttaatacttagttttgatcaaatgtaaagtgaatgaagtattttatttctctaagtttcctaagtacaagcaatagaacttacttctacttgaaatttggttgtaaccatcgaattaattgattgcctagcttggtaattgagtgcctaagccagattcaaaagaaggaaggatgtatagcttaggataattgactgctctgtctctggaaacaatgagaagttctctatgtgattctacaatctattaccacatgtgacaatcaactacccagagagcacagaagcaatagagatactcaaactgaaacacattaatcaattaccctctctataatcaattatccaatttctggaaatgcataataaac

SEQ ID NO: 304360 - DNA, 403 bp, Glycine max
agcttctagtatttatagtcattcttcttcaatctaagagtctgctgtctctaaatggatataatcattcacttgagtttgggtttgaatattgtggtcgttggagaatttaatgttggtgttaaatacacatctttcttcatgctagaaaaccactctttttagcttccttgaagaacacttcaataggaaatcacttgctcttcatcaaagtaggtctatcacaacaagatgcatcttttgatgttcttttgaaactccaaagtggtgaacttcatttattcttcatgagattcgacagatcctaggagaatgtcttgtcatacaattcttataaaacaaatcttagacactaactattatatgaaatcttatatgctatattagatcataatatatatat

SEQ ID NO: 304361 - DNA, 433 bp, Glycine max
  unsure (1)..(433): unsure at all n locations
tataccanatattatatatattagtggtatactcgtatcaatcaaacttagaattgaagctagtgcagccaaataatatgtcatgtttgccacagaagttctattcatgggcttttaaataggtattagaaatagtgacaaattgtcttctatctctgaataaaatcatttgacatttagtcatttagattatgtgtctattattccatgctccaatagatcaaaagtcaaagcactgttctcttcttttataatctaaactacacttctctctcaaacttccatcagtatgcatgcgacttgagggtcattgtcattttatgaaattgccgctgagtttcacactgactaatatgaagacttggtaaataacatgaaagttatagtgaccaacgtctcgatgatgtctaagacgattctgaggacgaacatg

SEQ ID NO: 304362 - DNA, 426 bp, Glycine max
  unsure (1)..(426): unsure at all n locations
agcttgcaaagttagaaatatcttgtttgattccgatgttgtgaagtcaaggaaagatttttctattgccatgatgaggtcatctatagttttaggagcctctttgtgttgtaatgactgaatggcattaaagaagccaagatctaagacattaaaatcaagcaagtttgggggttgagaaaccaatcgaatgtcaaaaccgccttcactagcagcttaatggaagtcgttgtcatcttcatcaatgtgacatggagcattgtcttgttgtatgaaaatagtctctcctctatccnctattggccattttgctttgattgcagacaacacatgatgaataagaanatgtttgcttacttgtttaattattgaagatattggttntgttccatagtccctgtatctcttgttgcactccttctcttt

SEQ ID NO: 304363 - DNA, 471 bp, Glycine max
  unsure (1)..(471): unsure at all n locations
ctgaaagtgttggtttcaccttctcgctaagccaatccgctggcttagtgagcgtccgctaagtgcaacactcattggctaagcgcaaggaagaatctggaagaagatgagctatacaggttcgctaagcgcaccatttcatctcactaagtgcaccacttcagtccatccgttaagcgagaaaggcacgcgctaagccgaaattcactaatgtgcactaagcggtccagaattgtgctaagcacacgagcacgaacaaggccacttatttaagcctgaaatcagattttaaagggggagtttgaactgggattcagagattntcatgtcttgagattctagagagagaaaggtccaagttccagagagttntgagagattatgttgtgtgaagaatggcagacaccatagctggaagcacgagccgatttgagagctcgagatgagttngtgagtgattgtgagttccta

SEQ ID NO: 304364 - DNA, 376 bp, Glycine max
agtctttgtattcaatttcgagcgtgtcgacatattacgggactctatcagacatccgagtaaaaagttattgtcgtttgaatttggtcagagcttcgataatctatctcgagcgcctcgatatattacgggactcaatcatacatccgagtaaaacgctattgtcgtttgaattcgctcagagcttcggtctttaatattgagcgtctcgacatatgtctggacttatctccacttccgagtaaaaagctatttgggtttgaatttggccagaacttccggattcaaattcgagcggcacgatttattacgggacttaatctcacatccgaatcaaaattattgacgtctgatttgccagaacttcggtattcat

SEQ ID NO: 304365 - DNA, 405 bp, Glycine max
  unsure (1)..(405): unsure at all n locations
ntgagcaaattcaaacgacaataaagttttactcggatgtccgattgagtctcgtaatatatcgagaagctcgaaatggaataccaaagctctgagcaaattcaaacgacaataactttttactcggatgtcttattgagtcccataatttatcggaacgctcgaaatagaataccgaagctttgagcaaattcaaacgacaataacctttttactcggaagtcggattgagtcccgttatatatccagacgctcgaaattgaatgttgaagctctgagcaaattcaaacgacaataacctttatactcatatgtcggatagagtcccgtaatatatcgagacgctcgaaatggaataccgaagctctgagcaaattcacacgacaataactttatactcggatg

SEQ ID NO: 304366 - DNA, 357 bp, Glycine max
  unsure (1)..(357): unsure at all n locations
agctntttcttatggtctgtaccacacattattataacgaacacccttaatgtcataaaccataagtttatgattaaaaaaaatgttgtttagcatgacctattaggtcatcccatgtcaactataatgtggaaaatatttaaaaattcatgtggacatccatggaagagccagaagattcttcagtccaatgatttctcatgtactatttattctcaaaggaagttggtaattacactatcaccaagaaaaattggaaatgagtctattttatttttagaacggatataatgtgatatttgtggatcaatatattcaccatatggatcatttagatatttcatgatgcatcaacta

SEQ ID NO: 304367 - DNA, 459 bp, Glycine max
  unsure (1)..(459): unsure at all n locations
attgagtccgataattcagaatcttcatctggcaattgtgttttggaggcatggaagttaccaggagtggctccgtttgctttctgtctctttttctcgaagctcgtggcttacactnttctgtactggttgcccttctacataaggcacacaggtaatcattattattatattacatgaaaaattatgatatatatagagttgcattgccttttatctaacatcagcatgttattcatatgcgaagaatttattactagtgtcttcatattcctgatatattgtctcaagggtttgtcactacgaatttggagtgcttgtttggtaggactggtatgtgatgtgtctttaggcagatatgaatctgtgtgacaggtattgcatggcggtttattagcatgtatggtgcaatttgaatctggagaaataattgtatattttcacaagctctctcagcta

SEQ ID NO: 304368 - DNA, 429 bp, Glycine max
  unsure (1)..(429): unsure at all n locations
agcttcttcacatagtccgcctttgcttgaccttctttatgcttaanaacagaaacattaggcataggcaaaagatcaagaggagttagtgggttaaaaccataaacaacttcaaaaggagaacaattagtggtgctatgaacagctctattgtaagcaaattcaacatggggtaaacaagcttcccaagtttttaagttcttcctcaaaactgtcctaagcaaagttcccaaagtcctattaacaacttccgtttgcccatcggtttgtgggtgacaagtgagtgaaaataacaatttantgcccaacttgctccacaaagacctccaaaaatggcttacgaacttagagtccctatcactaacaatgctccttggcaaaccatggagtctcacaatcttcttgaaaaacaaatcagccacatgggaa

SEQ ID NO: 304369 - DNA, 449 bp, Glycine max
ctcatgagagagtcaaagatcaaactgagaggagatataaaagctatgtctttctagccaacaaagggagaaagaaggttgtcttcgaacccggagattgggtttgggtgcacatgagaaaagaaaggtttccggaacaaacgaaatcaaagcttctaccaaggggagatggaccatttcaagtgcttgaaagaatcaatgacaatgcttacaaagttgagctgcccggtgagtataatgttagttccaccttcaatgtctctgatttatctctttttgatgcagatggagaatccgatttgaggacaaattcttctcaagagggagagaatgatgacgacatgttcaagagcaatggcaaggatccacttgaaggacttggaggacctatgacaatggctaaagcaaggaaagcaaggaagctcttcacaagtgctgccatactattt

SEQ ID NO: 304370 - DNA, 406 bp, Glycine max
agctttatggtatttatcgggatgtaaggcgggagatcgatctcccgattcatatcaaaccccatgtgtgccaaattaccttccaagtaatggacttaaatcctacctacaactgcttattaggccggccttggattcattctgttggggtggttccgtcaacactgcaccagaagctaaaatttgcggcggagggacatttgattatagctccgagagaataagacatacttgctagttgtccatcttcaatgccttatgtagaggctgcagaggaatcattggaaacatcctttgaagcattagaagttgtgagcaatgcttacgtagagtctcctccactgcagccgtgctcatctagtgcactttgatagttgctcaagtgatgttagggcaccgatattat

SEQ ID NO: 304371 - DNA, 498 bp, Glycine max
  unsure (1)..(498): unsure at all n locations
attgatgccttgtaggaccacngatnagaaaagantcgntatagatatatgggctctagctaatcttggaactcantgttcttgctgcttataacctcaaactgactgatggtgcatgtaatcaccatcgtttctattagattcttgctcaaactgtgtcattattccaccaaggaggacctgattgtgccctagcctttaccagttaccaccacttggcaacaacccttcaatactcctttagtgactttgagcactcattacgatcctgacttcctcgacttcgagctgtaagtgttggtccatcggcagggatcatcactcgttgatacttaatggcaagactggcactatcataaatacacctatcaccttgtgcacaagtgactttgcacattccgcaagctgagatgacgaccttatcctgcattagataggatcatctctggcccttagactaatctacgcgcgcatactcttaattttccgcaaaacgac

SEQ ID NO: 304372 - DNA, 157 bp, Glycine max
cgtctggacagtccacatatatgaagtgagacattatatcctcgattctcgcctatcccaccttttagtaccaatctgctatgatcagtcctatgggacatcttcgtcctatatattcgccagccttgtcatatcaatacagtgtattcatcaaccg

SEQ ID NO: 304373 - DNA, 422 bp, Glycine max
  unsure (1)..(422): unsure at all n locations
agctttactaattaataatgtactcttctaaggcttttactatgttgttaagtaaatgaagaatagaaaagaaacttaaccaaaagtaaaagcgggaattaaagtgcatagtggaaattaaaagagttgggaagaaggagacaaacacacaagagtttttatactggttcagcaacaacccgtgcctacatccagttcccaagtgacctgcggtccttgagatttcttttcaaccttgtaaaaatccttttacaagcaaagatccacaagggatgtaccctcccttgttctctttgaacaacctagtggatgtaccctccactagaactgatccacaagagatgtaccctctcttgttctcagtcaacaacccaagtagatgtaccctctacttggaccacanaggatataccctccaatgt

SEQ ID NO: 304374 - DNA, 485 bp, Glycine max
ctgctctagacggtccaaggtagttatcgaacgggtggagtctaccatgcttggagtgctcaatgaaagcaccaagttgttgtgaccctgcacttagcctagaattcgaggttctagggcctccacaagaatatgagggaaaaggaaattgcttgtattattcactccccatcagaattacataatctcctatttataagcttttcatataaattctagaatgaaatagaagatacaattctaacggtttctggctttctatgccttgaaggaaagctaggaatatactgatattgcttcagagaatcctttctaacggtccaggatctttggagaaatgcttctagatggtggtgacctggctcttgatgcttactatgattattttgcaacataatcctccaagtatctcaggttaatacctcttctctttccttacataacttctgcattgtaccctgatgcttctctgtgcatatcaaata

SEQ ID NO: 304375 - DNA, 403 bp, Glycine max
  unsure (1)..(403): unsure at all n locations
agcttangtcatggttcagtgtatggtttccttgagcctcggcctatacacaatactaaggatagacgtcaagaatgtcatcattacattgaagcatgggtgaaggattcgcaacggcaattgtacttacgagcttacttgaattagtaagttaaaattatgtagtacattctaaaaatatttgcattataagtacctaattataattgtcaactttagggcacattggcaacttgttgttctgtgtccacgggataatattggtgtttggttttgttctttgtgaaagaagcctgatattaacatcaaagttgcaattaacaagtcttttaataatttataattgatttagcgtataactattgtactatgtcaaatggattgtgatgttatatatgtttat

SEQ ID NO: 304376 - DNA, 432 bp, Glycine max
  unsure (1)..(432): unsure at all n locations
cggccaganacaacctatatactattatatatatttccttttgcatatctataccaataactaanagggatacctcttttgataaccatcttttggtctccatttttaaaatgattattttactcttcaaaacttacatttttttattcatgtaaccacccatgttatataaattgttcattgaagtacttactttatgtaaattgtttgctttcttcaagacacaataactacctatattttcatttttttatgaatgaagccacaacaaatgttctacactgtaatttgtagtaagttgtggcacaacaaggtagaatggcagcggcataggcaaactgtgacagtgcggagatggacaacgcatagtcctattgtaggagcctcaaggagaattacgagaatatgtgaataaatattgtctttacagtt

SEQ ID NO: 304377 - DNA, 398 bp, Glycine max
  unsure (1)..(398): unsure at all n locations
agcttgttcgcattcttagtgaaggaataccgagacttgtgggccgttgcacccatttagtctcacattntttctatccaacaacccaagagtccgatggcatgcggagccaccttacgcttatccgcacctcctcattcggagaccccaagttcgatgacacgcagagaccaatgtggtaatctgcaccctttctcgagatgtcagcgtcttccggtcgagacaattttagtctcacatttttgctatctggcgacctaagagttcggtggcttgcagagaaaccttacggttattagcacctcgtcattcggagaccccgagtctaatgacacgtagagaccaatgtggtcatctgcactctttccggagctgtcagcatctttcggccgagacta

SEQ ID NO: 304378 - DNA, 390 bp, Glycine max
cctcattgtctctcacagactttagaattgggagcaaatccaatccttgtgtccggactctcagtcacttatggtagccgccgatgatcccgttactgcttcccctaagctctctgtgctttcttcacaccgcatcacctgccttgcgaactccttggagtacctttgcatttgggtcactgaaacctcgtgtcatgaaaggcgtgatgctttcgtctaatggcgctcctctcatggggtagccaagctgtctcatggcgaggacggtattataattaatacaacctcttgttccatcaagggaacatttggacatccttcgcatgaagatagaatcctgaatcttccttccttctagcgagggaaccaaataacaaacgcctctctatg

SEQ ID NO: 304379 - DNA, 568 bp, Glycine max
  unsure (1)..(568): unsure at all n locations
cctctctctgctcctctccgcaagcacgcagatttaatcatgttattgtcaatcccacacaccaaanncnnnntgttgcgtcgtctatcacacggcgaancgactcgtacccgggatcctatagatcgacctgcagcatgcaagctagttctaattctacctaactcgccaagctatcgggaggaactttgtgactcttactacctacaaactccttttctctttattaagtacagctctgatcgaagataaccctcactaaactggcccttatcatatgcttctgagaagatattaaagtcacgtcactatcatctctatgactcttcacgggagcaactgatcaaggcacacaatgcccagctcttttcacaaggacagttatttattatgacatggactaactgatactccgcatcgacaacgaacacaaatctaggacgaggtcactataccacttgtagtacatagagatctgctggagaaaccttggataataactaagttactcttaacacagcaagcccagatgatattcattggcacttctcaagataacgcggacacc

SEQ ID NO: 304380 - DNA, 242 bp, Glycine max
gtggagctttatggagtgagacaatagtgcacttacactgcaattgaagagcaggggagcacctatggatatgagacctcttgctgtgaaagggttgcgagatatggatgcagaccatgaactgcttcctgctggaatgatctttggctaaccaaagaaactcatgtacatgatcatgctgatgctatatgacgcaatgcttaaatccatatacacgcctacacatacagtgcaaaatatat

SEQ ID NO: 304381 - DNA, 426 bp, Glycine max
  unsure (1)..(426): unsure at all n locations
agcttttcatatggataaaaggctcacattcactttcttctacatcatattcaaacttgtccaaataaataataaagtcatctcgactcacagaaaatcatataagtctcatacaattaatatagaacctatatcctaatgtcacatcctatcagagcgtggtgtttccatgtcctctagcacgaggatcttcatagtcatccacctattcatctgctcccccgaacacaagttcaagatcatcacaggatccaaacacaacaacacacagggagtgagttatcacattcctagctaatagagaaacacgacaattaaatatacatattatataaatgagataccacttgcttaaacatagctcacgtaacttcaccacttcatcattcanaattcactttgcaattatcaatcacattacacaag

SEQ ID NO: 304382 - DNA, 478 bp, Glycine max
  unsure (1)..(478): unsure at all n locations
ccgtatagtttatcaattcaactcgagatttgatataaacatccaaatttcaatgtttccccaatgttgatacagaataacagcgatactcattntaatatacagagagggacatgctatgatacggcaatgatataagagaatatggcaaattgcaacttataaattaatttaaaattaagtttaatcatcatgcactcacaagtttaatggtcaatcaatcataaatctttattaatatataacttttaaggtataatctattttctctttaaaattaatttatttcctttttaaaaataaattagaataaaagttcagattataagagaattcatattctagaaatgaacataagtcaatatatacataaaaatgttaaaacttatataattagtatgagattctaatttatatttggatacaagttaanaaagtatacgtagaaaattatgacaataacataacagtatccata

SEQ ID NO: 304383 - DNA, 423 bp, Glycine max
agctttaatgtccctctggtctttacaccattgttttatagtgtatctcaagttcctcaacttatttttaagggcaattcccccccccccccaaccaccctacagatctgtattccaagcctctttgatcatagagtggtaccctttatgattaagccaccagtccacaacccgaaaaggcttagggccccagtccaccatccttgtcttcaaaatgattggacaatgatcagaataatctctttgaaggacatgttgggaagtatcaggccacaaggataaccactgatcagacaccaagaatctgtccagcctactcttggcactgccattgagcctaaaccaagtaaaatagctgccaaagcatctaatatcatggagctccatctttgatatccagtcattgaaatctgaggtatctga

SEQ ID NO: 304384 - DNA, 423 bp, Glycine max
  unsure (1)..(423): unsure at all n locations
tagttcaaggcagagttgtcccaaatatggtggagttatatgtctaaataaaattgtaccaaaattgtgggagacactacgtaaaggaatgaaatggtcgaagcatagcagcatacacacacagttttgggtgttcaaaaaaataataataataataataaaaactgtaagtataaataaaagtgtataaaagtgtgtgtgttgcaaatcaatgaaatgaaagttgagtgcctaaaaaggggaaagtagtgggttgggaattaataaaagtaaaggctgatgtatggatgaatgctcttctagaatttaagcttttgaatcctacaanaaccatgatttgttgatagcccaacctcattacaagcctagaaagcccttcggattcaatttgcgtatctaattatgtatggcatgagatgaaat

SEQ ID NO: 304385 - DNA, 240 bp, Glycine max
agcttgaatcggacctcagtgtaaaaagttatgaccattgaaatttctgcagagcatccgttgttcattttccagcgtctctatatgtgatgcaccttaatcggacctctgcgtgaatagttatgaccatgtgaatttctcgagagcttgcgttgtgcatttacgagcggcgctacctattacgcgtccgataccgacattcagggaaaaaggtatgaccttatgaattgcacaagagct

SEQ ID NO: 304386 - DNA, 401 bp, Glycine max
ttcgagtgcctgtatattgatgcgcctgaatcggacatacgagtgacaagttatgaccatttgaatttctcgagagcttcctatgtttaattttgagcgtctcgatatattatacgcctgaatcgaacctcagtgtgaaaagttatgaccatttgaatttctgtagagcatccgttgttcattttcgagcgtctctatatgtgatgaaccttaatcggacctccgtgtgaaaagttatgaccatttgaatttctcgagagcttccgttgttcaatttcgagcgtctcgacatattatgcgcccgaatcggacatccgtgggaaaagctatgaccatttgaatttctcgagagcttccgttgttcaatttcgagcgtctcgacatatgatgcgcccgaatcg

SEQ ID NO: 304387 - DNA, 385 bp, Glycine max
agcttgttgttgctgctccacagagcccctcggaacttgtttcagccgtgctcttccctacgagccctcttgggctgttgttcgaaggctttggctgttgctatatttatatctctcagatcggcattctcctttcggattctcagagatgctgatttgaacctttctttgactgtttgggcttgctcgagttctgccctaagggcctgcacctcttcgtctttcttcggtgcctcaacttcctcccttttagcggttctcatactcaggagccaatccaattcttgcacgtgggctttcaaccacttaccgtagccactgatgggcccattgttaccgcccctgacgtctttgtccctcttttgcaccacctcccatgccttgc

SEQ ID NO: 304388 - DNA, 477 bp, Glycine max
  unsure (1)..(477): unsure at all n locations
tcaagaattgatggcctcatcatactactagttccctgaacgcaattcaactaatctgcctcccattgttaatggagtgggttaccattattggaaaacccgcatgcaaatcttcatagaggctatagatttaaacatttgggaagccatagaaataaggccttgtattcccaccatggttgctggaaatacaacaatagagaagcctaaggaagattggagtgaggaagaaagaagactagtacaatataacttaaaatccaaaaacataattacatatgccctaggaatgaatgaatactttagggtatcaaactataaaaatgcaaagggtatgtgggataccctacaagtaacacatgaaggcacaacanatgttaaaagatctaggataaacacattaactcgtgaatatgaactatntangatgaatgcanatganagtatgcaagacatgcanaagaggttcacacacat

SEQ ID NO: 304389 - DNA, 412 bp, Glycine max
agcttgtatgattatggcgtacccatcacatgtggtactaggtggcggtcgggcgatggtgcacaataagttttccacatccacaatgcgcgcataaacccaccatcccctgttgcccacctccaactgagctcacgtactcccacgtagctcatatcctcgtttctctcaacaccaggtccccatcaatcctcccaagcttccccaacatcaaagtaatacaacattctcacagcacaagctatcacagctaagcaaaacagggcaaaggcagaaaactctgcccaaaacaccaaccaaaatcacagctgttcacatacaaataccccagaaacatttccttcgttccaattcgttaaccggtggatcgactcgaaaatattactggaagtctctagtacttaagcctaca

SEQ ID NO: 304390 - DNA, 471 bp, Glycine max
  unsure (1)..(471): unsure at all n locations
taatatatcgagacgatcaanattgaacaacggaagctctcgtgatattaaaatggtcataagttgtaactcggatgtccgattcaggagcttcacatatcgagatgcacgaaattgaacaatggaagctctagagaaattctaatggtcataaattctcacacggaggtcctattcaggcgcttaatatatccagacgctcgaaattgaacaatggaagctctcgagatattcaaatggtcataacttttcactcggatgtccgattcaggcgtatcacatatccagacgctcgtaattgattagcggaagctctagagaaattcaaatggtcataacttttcacacggaggtcctattcaagcgcttaatatatcgagacgctcgaaattgaacaacggaagctctcgagaaacttaaatggccataagttttaactcggatgtccgattcaagcgaatcatatatcaa

SEQ ID NO: 304391 - DNA, 432 bp, Glycine max
agcttatagagaataaagataagggatttgaataagcttataaccatgtcccaagagatgcattgtggacgactctggagaaaaaaggcgtggcactatttttttttttgctcagcaaaaatataatatatatatatatatatatagactagtaccagtggtactgaaattacataggaatagaagtgaatccagctattccaaaaaattgagaaagagctggagacacaaaaatgtgttacaagaatccacccacacccgccccccctaaatacagaatccttccttcagattggaggaccattggttaaagcgtatagcgaaatccttgtccattgctctgttccaagaccatagtaggagtaaagcatcgtcgagcagcttacaaccatgataagttccattttggaacaccaccttatttctatgctg

SEQ ID NO: 304392 - DNA, 629 bp, Glycine max
  unsure (1)..(629): unsure at all n locations
cgcctctctccgancgctctacttacatantactatgtatgtgtagtnatttacantaatgnacacactgttatcacaccnncatccctcagcncgnngncctttgatggtagcaatccatcngatnncgngcaannannaacctcgcgacctgnctgaatctatgtctctattgacgaggttatctaattatttaggctgaaaagagattgacgagagagatgaagagacgaacacacactgtgctatttggaacgatagtacaatcttggcacacaatattatgtgcaaacagcatgtgcactccatagtccattgataatacctgatttatcgatgacaatcatggcaaatgcacttggacctattgatgcacctgccataaagaatttccaccttgacatgaatgtcaccagcatctttatgtatgaaataatatattaacatacttattctgtttactctgaatatgattcttatgtattgtgggtgtgcctaaatctaactcaggatagcatatcgatcgatactggatgcaagaatcacacgtcaactctctgttaatgactccttcggtcatagcatatgatgtatgcaggcatcataagagtcacaccttttaatattcn

SEQ ID NO: 304393 - DNA, 432 bp, Glycine max
  unsure (1)..(432): unsure at all n locations
agctntaactgaagcactaagtaagttaccagctcaattgcattatggacaacctttaccctcttttgttttgtaggttgcaagttgtgttatatgtggtggggcacatgattctggctactgcattcccacagaagatacaacacatgaagtgaactacatggggaaccagccaagaccaaactttaatgcaggtggatattctggattttcacaaggccagcaatataataagcaacagggacaatggagaacgcaccctggtaatcagttcaataaagactagggttggccacctaacaggccacaacaacaagggcctagtctctatgatagaacaacanagctggaagagactcttgctcagttcattcaagtatccatgtccaatcanaagagcacaaagtcaaccaactcgaagctttaactgaa

SEQ ID NO: 304394 - DNA, 362 bp, Glycine max
attctcatttgaagttggagtctctgcatatatctttgacctcacagggactccgatatggttacagcttctaatgttatgagtggtttgctcacaccttccacatgtatagccagccaataatctcttgagcctatgtactatgagaatgacctcatctgcgaatctacttctatgcatctatgccctatactatatggacccaatatggcgtgcactagtactggttcaataagatgacaggatgtcttattatgagctggtcttgacgcgtcacttatgacgcatggcctcaggcatgacatctttgtgagctagtggtgctctggcatgtcaagatgtcatccctacatcaaagttgt

SEQ ID NO: 304395 - DNA, 370 bp, Glycine max
cgaaccgagctcggacccgggatccctaggtcgactgcagcatgcaactcagctttattatcatattcgctatcactcacctttcgatgcgggaatatctcacttctctgatgacaatggctttaaggagttagcccacttcttctctgatcagtcttcatcattcttcacccttctttatcttcttttgtgataccggtttcctactagggactaatgacaaacctgtggcacataatgctacggagagattcccacatgccagaaggacgcacagcacacagcgctgctctcctgcgtacacatcatatatgccactgcgctcatgtctatcgaaatccctattgagctgactacactactcatgcta

SEQ ID NO: 304396 - DNA, 429 bp, Glycine max
  unsure (1)..(429): unsure at all n locations
agctagaatttgagttggtttactcctaaaccaatgtctattctttattaaaattgaattgttttaaaaaataattaactaattaaattattttattccagtatactatttaaatataaaaataaagaaaattaattaattaattaaaatattttaaaaataaaagtaattaatttttgttatatttttaattcttttgaaactgtaaaattcttagactacaaacacctaagacaaagagaaaagacaaccgacaaatgctctaagtcttatccctaaaatcactgaatgaacggagttgcctgtccattgttgttttattgacttacaactggcatacactcttgcatgtaaaacctctattatcatctctgtaattggacttaacctctcagagttctagtgaatatntatgcaatgcttaagatc

SEQ ID NO: 304397 - DNA, 243 bp, Glycine max
tatgcccactatgtatattgctagaatatgtatgagcataaggggcgcacaatttgtatattcttgcgatcgactcagaaacatcatattacatattacaaagactaattctagatcatatttaattatacatgagaataatttctatcatacgatactaagttaacttcttctagtactggaccccatctctattcttatctactctattaataatatactatcttatacacactattactt

SEQ ID NO: 304398 - DNA, 426 bp, Glycine max
  unsure (1)..(426): unsure at all n locations
agcttttagttcctcccattaggttcctaaaataagggcacggagcaaacacgctacgtgtttgtttccttgatattgccatgcatatctttgcaatgtcatgtttgtgtgtgtctgttgtgttattattcaatggcattaccatgcttgttcatctagtatatttatgttttgtgctatcaactgcatgctcttgcgcatgtatatctatattgcgtcgtcacttatgcgttgcatttgtctcgtcattttgtcacgggaagttggaaggtccggatcaccttcttaaatgcatacatggggcactatggtaatgactgcanatgaaccatgatgctcgaatgtttgtgagtaagaagagatgatcttccgagctcttgtgtttgaaaatgcatttgtgtcatgcatggcataagcattccttca

SEQ ID NO: 304399 - DNA, 410 bp, Glycine max
ctcgcattctagacaaaccaatattgatgtagcaccaacctcattacaagccaataaaagtccttctgattccatttgtgtatttctgactttatggcatgagatgaaccacaaagattgctcctcttgttagatgatatcgctaaatagtttatacactcgtgcatgagtgatacacgagccgtgagaattgggctaagcatcattctatcataccctagtaacgtctggagaccattgtttgtcggcatgctaccttcgttagaccacctcagaatcatgaacacccatcattatggaatctgtccaggtccgagatgtttcggtaagaaaccgatcaagagctcacaaatgggagtgtatttagcatagcggtgagtgcatccataaactatcacactctaatttca

SEQ ID NO: 304400 - DNA, 420 bp, Glycine max
agctttccaatgtcttcaagcatcaaatcaatacaatgggctgcacaaggagtccaataaatatgtttccttttgtcctctaacaacttacccgctaaaacatagttactcctattatcagttacaacttgaacaacgttctcttctccaacttcctccacaatagcatcaagcaactcaaaaagcttttcacctgtcttcacaaaatcagagccatcaacagacttcaaaaacattgtaccagcttgagagttaaccaaagaattaatgatgcatctttgtttccgatcagtccatgcttcgaacataatagtacaaccatacttgacccattgctccttgtagtctttcatcagatctttagtgcagtcaacttccttcttcacgagtggaactctgatatcatgacagctcggaatg

SEQ ID NO: 304401 - DNA, 389 bp, Glycine max
  unsure (1)..(389): unsure at all n locations
gatactcagcttgtcttgatttttctagttcttaacaagctttgaacaatatacttgcccttcatttaactgtctctgggcttggcggccacgctcaacanagtactttcgacacctattgtacattgatttgaccaatgctgttatgggaatgttgcgataatccttcaaaccttattgatacattctgagaggttggttgtcatgtggccatatcgacatccttctctatcataagccatcgtccatttttcatttgaaatgcgatcaatccatgttgctatggctggactcagttcacgaaattttctaaatttgatcaaaatgtcttgcaggagtgacgctgctacattagtatgataaaatttaagatatctgaagtaataacg

SEQ ID NO: 304402 - DNA, 425 bp, Glycine max
  unsure (1)..(425): unsure at all n locations
agcttgaccaggaattacttgtatgggttggatgttgaattctggttgttcctggtgcggagatgatggtacagcgggtgaaccagaagcggaagtttcttttggtgaggtagccatggaaaagcagagcgtttggaatgatttcgtaaatttcagaaggctattgggaaatgctggtaaaaacacgaatgccaagcagatataaatttgaatgaggaatgtatagggtcgtgtgaagcaacggtcgaattttccttggttcagtagtgaacgtgctattaatgttaagtgattcgtttgggcacgttcagattgctgtagttgctataattnctctagcacacaaatgcccagcttgcccctcagttnttcaaactgatttgcatccaaagcctttgtgaacatatctgctatttgttcctcag

SEQ ID NO: 304403 - DNA, 443 bp, Glycine max
  unsure (1)..(443): unsure at all n locations
ngacaaacanagctaatcgaagcaagcaagaaataaaatcaattattgtcacaaaatcaatcgtgcaaaaggcatttgaaatggtaacatcttttaatattttatattcattttcttataagttatataataataacgagttttttattttgtgattgtttttatatgatatatgaaagtttggtgaaatttatataaaggcatcatgcattagattatattatttaatttgtcttttactatatttaattttaatagaaagaagattcaaaatatggtaaatggccatatgctctggaagtttggaaggccacacacatgagatctaatggaacttggtgcattccaaaaggagaagaaatcatggtaaagaanaaattcattttanagtcttggtgtcaatattagaattaaagacattaattggattatgatatcatatc

SEQ ID NO: 304404 - DNA, 424 bp, Glycine max
agcttgtcgcatctgctaatggcgatatagcctgaaccgtcattgtcattggtgagggagctgcttacgtggacatgtcgtcattgttgttggcgagaccggctgagtctggtgacgtggagagagtcgccaatgcttctggtgatatatgttgcaggagtggttctcgtcactggaaatggcgagactggtgtcggcggattctcttttcctttaaataggcagcctttgccttgaaaatttgtagtagtcttgataaaagaaagcacagaggagcgtgtttaatcaagaatttacaagccttactttcattatctctagatagcccagcttttgccttgaagcttctcattccatccttatttatttgaagcaacaatttatattgttgttcagtcaataatttatcagtcttgcattcatt

SEQ ID NO: 304405 - DNA, 483 bp, Glycine max
  unsure (1)..(483): unsure at all n locations
ggatgcatacaacctatatgctccaggttgagggggagagttgagatattatgtagattacagagatatatattaagagacatgatacgagttcgatttagttatatcagatttgatttgtatttatgtagatgagatcttttctatagtgtaattaggatcatatttctagtgccattgtatctttagaattacctctattcatgtatcctttttacagtttaatcaatccgaaatatacatacttcttcaattatttcctccagtctcaaatataccatgttgagtgttatcagcaacaaattttcagtataataaagtattactagctatttccagtccagttctatcagaatgtanaagaagggagttaagttcttacaacagcaacaacaccatcatatgagttaagcttcacatttgtcanagaagacatcacatcaaatgcctctcctgctctctctgtcacaatcacctagtaat

SEQ ID NO: 304406 - DNA, 425 bp, Glycine max
  unsure (1)..(425): unsure at all n locations
agcttgaatgtgtgtagcccaccattttccatagtagaatactggtaatgtgtctactatcattgtcatcgttttttcgtcattgaggtgccacttgagctgccaggttctccacctttgggcgtattctttgaaagatccgtgcccccttttttttgcacatattttgtagttgcatcctatccaaagccattatactgacactgcctaacgaaggaaaccattatgtccttccaatcatgggctcgggaaggttccaagttagtgtaccaggtaacagctacccccagtaagactttcttggaaggaatgtatcagcaatttctcatcttttgcgtatgccccccatcttctgacaatacatctttagatggttctcggggcaagtagtccccttgtacttgtcanagtccaacaccttgaac

SEQ ID NO: 304407 - DNA, 412 bp, Glycine max
tctcacagaagccacgaggaagcttcttgaggaagcctcttaatgaagcatctcaaggaagctacatgtagctgcctcggtaaaaacgctgcccagtctacgttaaccgttggatcttctcataatttggtttgcaacttcacaagatactttaccatgatctgacagttgggatctttgtgaacatttctggagtgtgcgcgacgttttcgttcccgagagcattgctcacttgtgcgttttgagccttgtagaccaagtagcttatgaataatgccatttcttctcctttctttcttccaaaaccattttcagcgttccatgctgtttctccgtcacccatagccaccagtagccaccacaaaccaccattgttcttcgttgaaaccccacaccgagaggaacccttcaa

SEQ ID NO: 304408 - DNA, 407 bp, Glycine max
atcttcttcatgtttgaccccctaacattaagttggagtggacagagatgaagataaagcaattatacatgaccctaaatggagatgatggcggatacaaaactttatcttgactgagattaaggatggagacgaacatgagagtggggaacgacatgcacatctctgccttgtcccgtagtcatgcctattcataataatcacttatatatctttttgttaaataattatagattttgatatgcttaagacaccttttactctgttaattatcttctatcttaatttcattgagtggaatggggatgggaacaacatacccatccctgccttattccgttgtcatgcctattcacaatgatcactaatacattgttttattttaaataattacagactttgattag

SEQ ID NO: 304409 - DNA, 472 bp, Glycine max
ctctagccagatggacttaccttgaattaattcctttgttatctcctatgagcctattttcccctttctttgttttgaagctcattacaagccttaagtgaaaaaccatgatatcaccttacccttaaggaatcttggagctttggaattgttttgggaataagctgggaataagtgtggggggtatgtttcattggaagatatgatttttggccatgcttaatgttttattttggccatgcttgatgtatatatatattgcctagttctttctttaatcttcaattctgtactgttcaataaaaaagaattcagttgctacaaattctgcaatttcgtactcttcatcaaaagaagaagaagaagaataagacgacgactataagtgatgttgaataaataagggcttgatatgagaacttgatttgggagccttggttgatttgttgaattagagggtttgggttactac

SEQ ID NO: 304410 - DNA, 423 bp, Glycine max
  unsure (1)..(423): unsure at all n locations
tgcagcatgcaagctctgatggctattcctacttgactttcttttgcctcttctgctattccacgcttanaaagggctcactgacctccctgagcgagtaattgaagtttcgctcagtgccaaacttgcgctaagcctggaaggtgacaaatgactcgctgagcgagctgatgatgcacttagcgcatgcctgcgtgacaaatttccttccaaattcctcctatctgctaagcacgttgatgcctcacttatcggatgacactcgctaaacacattgagctcgcttaacgagacatcaactttatcatttcttcaaaataactcctttttgcttgagattgaagagaaactgacattaatatcatacacaaagcttctactgagcacagataataacaaagccaaatttatttactattctac

SEQ ID NO: 304411 - DNA, 460 bp, Glycine max
gtgaaagagcatggcgtatccatcacatgtggtactaggtttcggtcgggcgatggtgcaagccaactctccacatccacagatcacacataaacccaccatcctcagttgcccaccttcactgagctcacatactcctacgtagcccttagcctcgttcctctcaacactgagtccccatcagatctctccaagcttccacaacatccaagcaattcaacatcccaaacatcatgaactatcataaccattgaaaacagggcagaggcagataactctgcccaacacaaaccaatatcacaacttttctcacttaacaaccccagtaacattctcctcgttccaattcgttaaccgttggatcgactcgaagatattactggaagtctctagcacataagtctacattgtgaccgatgggatctgctatatgacgtccagaacacaatctgtactactc

SEQ ID NO: 304412 - DNA, 342 bp, Glycine max
agcttccctgtggcttctctgagaagctatctcaagaagcttctttgagaagctatatacttatctagccacacccttctattaactaaattaacctgcttgaaaataattgcggatgaaaaataacataacagataatccaacatctaacatagttactaatatatatatatatatatatatcacggcgttacacgcccatgtggtgctatcggaggaacctctaattctcaaaactggtcactatttctctccaataccacaagcttgttccatcaaacgcacggaatcgaattcgcgcgtggtctactattgagcgacctgaatcaagagtatatatat

SEQ ID NO: 304413 - DNA, 345 bp, Glycine max
  unsure (1)..(345): unsure at all n locations
ttctcagaatactgatagtgcctccctaaattcaataccaagatcaatgacaccttttaaaccatttttactgaattctgcattgtctctctgcatcatagacacatattcattgttgtctattcagccatcctaaaagggtaaaacatgaaaacaacaacatcataaatctattntaacataaataagagcttatgaaggccacttatgacctatcacctaatacgagcataaaaattctgaatagaaaagaaagcattgtttataatgttggttacttttcaatcataattctcaatctgattagaacaagggttacttctacataattaccgccatcgatgt

SEQ ID NO: 304414 - DNA, 322 bp, Glycine max
  unsure (1)..(322): unsure at all n locations
agctntntggaagtgggagatgtagaaaagaatgaatagtgaactgaatggaagggggcacccacacgaaattttgagagttggtcttgggttatgcctttagggttgaaattgggtcggagacaggatgaggatgcgattgcagcttctcttctacgatcctcttcttccttttccattgtctctttgatgttcactttcatctccttgcatatggtttcatcattggctgttatattttggagatcttccctggcttctcttaactacgtagtcatttggtaatcggaatatgcattattgattcttcaatcccccaccc

SEQ ID NO: 304415 - DNA, 400 bp, Glycine max
  unsure (1)..(400): unsure at all n locations
tcccaatgaaacactgtattgtacatngactgaatgaaacttgataattatatatgttatagtgacctcttcaatattgttatctatatttattttctcacattctattntatcacgcactaaaaatattgtatcctaaaataataattaacatttttttcatattnttattttctagctttaattgatgtcaatacttttcaccacaggataaatacatatcaatacacatgagtctttaacaagttaaacgatctttatattgacccaagcctaatgtatacaaggataagtttaccaacttttccagcacatgaganaggaagaagaggaatgcttggatcctgaacccattgaagaaaaggtgagagaggctgataacggagagagaaaatgatcc

SEQ ID NO: 304416 - DNA, 429 bp, Glycine max
agcttatatcaaccacgaccaactgtccacgtcaacactagtactggtagaggatctggcccacataaagaaaaattccatagttacttgggggtagtggcgcgggagaaaatccctattgttcatgctacttggaaagatgtccccgaaactttaaaagttattgtatgggatgacattttggtaagtccactcaactggtaacgagtttacttttgtgtatatttaatgcctgtggaaatgtggtttatgcagttactgattgaaaagtatttattattttaggccaaatttgatattcctgaaggtttaactgcgaagaagaaggttatgtccacggttgcaacaagatggaggcaatttaagtcctccctgacctccagatatctatacactgacaaagacgatcaacaaaacattgatccatct

SEQ ID NO: 304417 - DNA, 358 bp, Glycine max
atgatgttcgtgttgaacgcattacatgtagacataccacatgctttatattatgtgcatacagagctacatacatcttggaaacgatacatacggacatttgtgggccatatcatacgccttcatggaatggtcaacaatattctatatcattcataaacgattactccagatgtgcatacttgattgatatacatgagaagtcacaatctctggatgcgttcaaaacattgaaagtcgacgtggaacatcaactcaacctttgaatgcactgtgtcagatctaaccgtggtggtgaatactatgtcagatatgactgttcaggtgaacaacgtccagagcctatcgtcacgtacct

SEQ ID NO: 304418 - DNA, 425 bp, Glycine max
  unsure (1)..(425): unsure at all n locations
agctntggagtttccaagtgccaattcgtcttcttctttagtccagtcttcttctggcttcaatccatcagtgggctttccttctgagtccagcatcttgggatgttcccagcctttgatgacagctttccaggttctgctatccagtgatttgaggaaggccaccatccttgctttccagtattcatagttggttccatccagaattggtggtctgttcactggtcctccttctttctccatgttcatcagaatttatctccctaggtctcactcagtgatttcgagtgcccgctctgataccaattgaaattctgataccaatgccagatgtcgtacaggatgtcacgacatcacgcttcagaacaagcagattatctctgagtgtatgaacagattatacaagtaaataacacaagagaatt

SEQ ID NO: 304419 - DNA, 276 bp, Glycine max
  unsure (1)..(276): unsure at all n locations
tgcctgtccgatgcagcagtaatgatggcccgagttatgttgtggatctggttactaacccggaatgggtttaggcagagacaacggctgcataactagcctgatanatgccaaaggaaatcgtgggaagtatgtgctatgctataagcccactcacgcagatgtaaagagaatcatcgcgggaaggaacggcggaggtcaaagctcgcgggtgacactagaaagagaaggaagcccgtcctgccacataagtataagctgtattagcgcgagtct

SEQ ID NO: 304420 - DNA, 415 bp, Glycine max
  unsure (1)..(415): unsure at all n locations
agcttgtggctgcattcagaggtttccagaatatgtcaagagaagctgatcgaacgtacgtaggctagtagcaacgaaagtgaaaaatcgtgaattaaaatatgataatttcaacgacggtgatgggtataaaccgtagtagtcttgttacaaacaaacacggttcttataaaatcgcctttgtagcattcacatcaaaggcgattttataaaaaccgtcaaacaccttcataaagttgattaaaatttcaaaaatatcacaaaatcgatgtagatttaacgatgtagattgtttattttgtagtagtgtatctagcctataatttgtaatctcggggttattgtgatttgatgaccgcttgtataaaaatactatcttcttttattatattacgaatgttattgncatgtacgt

SEQ ID NO: 304421 - DNA, 436 bp, Glycine max
  unsure (1)..(436): unsure at all n locations
ngagagagatctcaagaaccggaggttgcttagggactggatgtatttactggttgttgccgaaccagtataaaattcttgtgttgttcttcttcttccatacactatttaatttccgttgtgtactttacttttatgctatacttttgtttaagttacataacttagtagtaaagcctaattgaatctagtaacattaagaaggatcagttttaattagtcaaggttacttaataattaattcaacccccctattctcaattactccaaggccacttgatccaacacattgtaccctgagcaactgccagatagttcttcttccttttcttttcttttcttaagagctgaatgtaatccatgtacccttatgggtcctctctgatattatgtatgtattcatcttctcacctttatcattagtaattncatttca

SEQ ID NO: 304422 - DNA, 423 bp, Glycine max
agcttgaaggtaaactagatgccttggttaacctggtaacccaactggccatgaataaaaaatctgcacctgtcaccagactctgtggtttatgctcctctgccgaccaccacacagacctttgcccttatgtgcaacaatctgaagcaattgaatagcctgaagcttatgctgcaaacatctacaatagacctcctcaacctcagcagcaaaatcagccacaacagaacaattatgacctctccagcaacaggtacaatcccgggtggaggaatcatcccaaccttagatggtcgaatccttcacaacagcaacaacaacaaccttattttcagaatgttgctagcccaagcagaccatacgttcctccaccaatccaacaacaacaacaacaacaacaacaacagcaacagccctagaaac

SEQ ID NO: 304423 - DNA, 378 bp, Glycine max
  unsure (1)..(378): unsure at all n locations
tcttgcgtagccgctctcggtgctcangaaatgccatgaacatatccatcttattactagctactatgaattctttagatcctgaatgtacaaccttcacatgatgctcgctcccctctttgatgtctgcaccatagaaaatcattatcagcgaactcatggatgaagtcctaatgatgccatgtacatgtgcatatctgaacatatagtgtatatattccatccatcatacattgtctggagcttacctggatagactctaacgtcacgcatacccacacccgaatcagaatccatgtaaaagctataccattcaatttctcagagcttcgttgttaatctgagcgctccacatatatgccccgatcggactcctgg

SEQ ID NO: 304424 - DNA, 258 bp, Glycine max
  unsure (1)..(258): unsure at all n locations
atcttattttagctanaagagatgttgcataaactgcttggagtctattacattgcgctcgaactatgtttttgcttctatagttaaccagctatatatcagatgcatttataagacatgcgaaacttacatcagtgttgcacatccctgttattatataattcatagacatattctaccaagagtaaaaatgcatataccagcatcaaagttttacatttcataaccttctcatctaatgcttgccatgcctcactg

SEQ ID NO: 304425 - DNA, 379 bp, Glycine max
  unsure (1)..(379): unsure at all n locations
cttanaaggcacattggccattggtaatcgattacatcttctgtgtaatcgattaccagagagtaaaactctctaaaaacattntaaattaaatcctttcgccataccttntgttgtttcaacttggaattttcttcctaagactctgggaattatcttgatcatatttcttgaatttcttggatatctaggattcttgtcttgaataaaacttgagaagcgcgttcctttggcatcatcaaaacatcaaaatatctttgcttctacaatgtcttcagtcatttacactttcagaagactacaatgtcttcatttacatttgagagactttcatgtcttcagtatttacgctttaaaagactacatttcttcatatatt

SEQ ID NO: 304426 - DNA, 216 bp, Glycine max
agcttcatgcttaactatgtatggaaaaacttcattactattgttcaagacatacaagtgagcttgtaacaaattgatgcaatcctaccccgcaagggcgatgtgtacaaaactcccagtgtaatggaccatatatgctatataacgccctacgggttttatgagccttatggtatattttaggcgcgtgtgctaagttcaagcccagttatgttt

SEQ ID NO: 304427 - DNA, 416 bp, Glycine max
ggcctgtctgatgcagcagtaatgatggcccgagttatgttgggaaacgattacgaacccggaatgggtttaggcaaagacaacggcggcataactagcttgataaatgccaaaggaaatcgtgggaagtatggtttaggctataaacccactcaggcggatataaagaggagcatcgcagaaagaaagagcggtggtcaaagctcgcggttgaggcaagaaagtgaaggaagcccgccttgccacataagtagaagctttataggcgcaggtctgggaaacgaaggtcaagtggtcgcgatatacgaagatgatgttccgagtacattggatttggtacgaccatgccctcctgatttccagctgggaaattggcgagtggaggaacgccccggcatttacgcaacgagcataat

SEQ ID NO: 304428 - DNA, 399 bp, Glycine max
  unsure (1)..(399): unsure at all n locations
agcttgaatggtcattgacccagataactaccgccaaacctgagtcatcaactcaggaatccccaaaaccaacaacaaccaaacagaccgtggctgactatgcctgatcaatacaaactctcttggccctagaagatataggcctcaccaaaataccaaaattggccaaaaagacctgngcagaaatggcctcagaatcagatgatgattctgaaacagatctgcaaaaacaaatccaaaaggccaaatagaccaaagctgtctgcaatcaaaaatcaagccaatcgttgactcaacaagaatcaacaccacaacccaacaacaattatatttcanaaaacaaaattttcaatgttctacaaatggaaccagaatactgtgacaagaatcctttcaaat

SEQ ID NO: 304429 - DNA, 490 bp, Glycine max
tagcctgattcagatcgaattgaagatggcttagcttatccttgtctagcttagctgaccaaatcagcctcagatgcaagggttgggcgctaagcacttgagactcgtggcttagcgcatgatcaaagatgcgcttagcgcgaagctcacgcttagcgaaaggactattgatgtgccattattttctcctatttcttaaccttttttgcaccattttaaataccgattagtcttaattgtcaaatttattacgcagatttattatttgggcccattcagctaattgatgtttttaatctaatttcaggaattaatgaagcattgggcttgaatctagaattgggcttggacttgaagaaggcagactaatttattctacaaaattagagcttatcttatcttatccatatattatttagatgtgatctcatctagatattatgtcatctagatcttatcttatctagagtcgatttgattttacttatgg

SEQ ID NO: 304430 - DNA, 408 bp, Glycine max
agcttggcatgaccacaacatggatgggcattactcgggctatggttgacaggttgtctagggtgagcatgatttatgtctcttcaggtactggaatatcttatgtgagaggtccctggttttaaccattttgacctttttgaccgatagacaacacattcgggatacatgtttcattttactccaagtgagcatatgttatacacgtgtgtcatttgtttacacatgttgcttcacgaaaggacatgtcttaaagacatgttacatggtttgtgggaattacatcatggcacgggttttcagagtgtcatttcagctcccgccagttcctaaaaggttgtggccttctctcctcatttaaaaagactgcatattacgttttctttgtcttcaatcttgaatatttcc

SEQ ID NO: 304431 - DNA, 431 bp, Glycine max
  unsure (1)..(431): unsure at all n locations
ntgatgcaacatatggagaggttaatgaaacaacgagatgatgttctccatgagaggctggatcacatggagaatatagatcataatgaagaagacaggagtagaagagggaatgatggtgttcctagacaaaactgaattgatgatattaaactcaacattcctccatttaaaggaaagaatgatccagaggcctacttggagtgggagatgaatatagagcatgttttctcatgcaacaactatgaggaggaacaaaaggtgaagcttgccgtcacggagttttccgactatgttcttgtgtggtggaacaagctacataaggagagagcaagatatgaagagccaatgtgtgatacatggatggagatgaaaaagatcatgatgaagcggtatgtgccggctagttactcaagggacttgaaattcaa

SEQ ID NO: 304432 - DNA, 424 bp, Glycine max
  unsure (1)..(424): unsure at all n locations
agctttatatgattggctaagattttgttaaaacataagcacttatacaatgaaggaaagctggagttgctgcacaagatgtccaacgttatgtcaaagaataagatcgggctgcacaatgcacaaggcaagataaagtgtcaaatgaagaattgaagctgcaagattcacgatgtcggatacaatgtccaggacatcctgcccgaaaatactggaattgctaaaagcattgatattgctcgatccacgatgtcggatacaatgtccaggacatcctgcccgaaaatactggagttgctaaaagcattgaagttgcaggatccacaatgtcngatacgatgtccaggacatcttgcccgacaatactggacatataaatctgttatatctttaacagattattgtgcagttagcaagagattag

SEQ ID NO: 304433 - DNA, 289 bp, Glycine max
  unsure (1)..(289): unsure at all n locations
tatangaagcatatcattacttatatatagaccatcagaccaattcatgagaagacgatataaacggcacatcttatgatggagactgagataaaacaatataccttgagttcaatggagttcactggaggcggaatgaggaataactgggggggacgcttcattccattcattaagcgataaaggcacacgctagtccgaaattcactaatgttctctcagcggatcataactgagctatacacacgatcactatcattgccgcttattttatcctgaaatcagatct

SEQ ID NO: 304434 - DNA, 264 bp, Glycine max
  unsure (1)..(264): unsure at all n locations
aatagctgggaatctatggctaaattacaagaggctttttcgacttatcaccttgaggacaaggtgagtactttatgcgggggtattgattagcataagcataagccacacatcaccaatgtgtacaaccgccaacacccatagggtgcaaaccacccagcaattacaacccacccaaagggtgtaaaccacccaataantatgcttcacccaaagggtgtcaagtcagaagaagtgaatcatggggacatgaccctttggaac

SEQ ID NO: 304435 - DNA, 278 bp, Glycine max
atctctgacttgagtcatcaagagactataaatatgtgaccatggcatgaatttaattaataatttatctttcagtctttcttcatcatgtctcaacatctttgaactcttctctacagaaatttctgagtcatttctctacctctttcttaaagcttttgctcaatactttttctttgaagagaagttctttgatcaaaaacttgtgttattcatctttttcattctcttctcgctttgccacaagaacagaaggactaaccgcctaaattcttttg

SEQ ID NO: 304436 - DNA, 623 bp, Glycine max
  unsure (1)..(623): unsure at all n locations
ctcccgctcntgtctatctnactcacatagtgactcnagtcgtagttctgctatcttcctacctcacccacccccacacccgcnnnnttagtgctgcatccttgtactacgngacatatacatactcaagcttgctgcactgagagacgggttcccagaagacagcagtttgtcgttattgctgagaaccctcaccttgcgacaaatgctatggaagaagactaggagatggacataaggaatccgcagtgttgcgagacagcaactgaaaagacgcctctgttcctgacactgatgaagatgttccaacaactgacacccacgacgactctgagcctgatatcaatacagatgatgcatcatcctgcgatccctatgctgaagaactctctgcccccaccgcagagagagcgtcatacgaagatgatcatgcgacgaaggacacccctgcaccagaggcaccataacctgctccaggtgagctcattgacctggaagaaatgaaatctgatgatgaagccctttgcaaccccggttgcacccgtgcgtggcacaacgaatacaaagcctgaaacggagcactcgcatctagaggttggcgaaatatgactatcgccataacg

SEQ ID NO: 304437 - DNA, 426 bp, Glycine max
gcttgttatgaagatgataaaacctatctcttactagatgtcagctagttgtgagtctgtatccataaactcaatgtcacaatcacctttgtgaatatgatccctaatgaaatgatgcttaatatttatacgctctgtcctagaatgcatgatacgattcttagtgatactaatgacactagtgttatcacatcttaaaggaatatgtcctaaatgcaatataaagtcagaaagttattgattaagacacaagatttgtgcacaacaacttcacacaacaatgtactcagccttatctgtaaacaaggcaacacatgctcgattcttactattccatgaaaccaggccattacctaacaagcggcaaatactactagtgcttctcctatctagtgtaaatctggaaaagtttgaatctgagtattc

SEQ ID NO: 304438 - DNA, 390 bp, Glycine max
  unsure (1)..(390): unsure at all n locations
agcttattgggtctcatagaatacttggagatcactagtcatcttcactacatgtttcccagaggtgcttctatgaacgtccaggtcttatcctttatcacacatagcatcatggcatcttcttatcttgtctgtgtctgtatgaacttaaagatcctgagggcagacactgtacctgatttcatgtcatcttttcaggagcaaattcaggacctgacacataagaactggtggagaattacctgcagaatagatgctgaatctttgtgcctctctgctctccaagaagatggcatgctccttgatgacaagagccacctctgatctcccccatccagtcaaaatcttccagaanacagaccatcaatatggatttgcagcatgtattgt

SEQ ID NO: 304439 - DNA, 420 bp, Glycine max
taagtgattgtgctagatggtgagggcgctactcttgagagaggctcagcaggagtactctgctacgtggacaatatggaggccacgaacttactaaaaggggagaccctggtgatacgatgagagagccgaaattgacgcgattctccaaatgcatctgttcctttacgttcggtgtagcttgacagatgaacaatgaaggatgctactgtaattaagggctagctggctcgacagaaagttaagcagaaagtgtcatgtgaaagaacacgcacaccctcgtatcattatgcgcccatcatcctgtatttggcgagttactccatcttgcataagccatggcgggaggcaacggacatatggaatgacatccatatgtggtaactacctccagcaggacatacttcgcatatgcgaccg

SEQ ID NO: 304440 - DNA, 386 bp, Glycine max
agcttgacatatttaacatacttaggaactttttttgtgcggtgggaattctctaattgtatcatgtgggccttttgaaagtaacaaacagaaggccagtctgttgcaagtttgctgctgaacatcacattccaccctaagaaaacacaaggtggattgcatcgagggtggataccttaccttagcacagaaggaaaaagtatgtcagtgcaaagtatggactaaactgctttcaggaaaaaagttgtaaaaattgatacaggttggaaaagggaattttccttcccggcttggagtcctcccaatttaaggcagaacccatccactccaatttctgcagtttaaaactttctctacttatttagttgtctcctctgagttcaacc

SEQ ID NO: 304441 - DNA, 387 bp, Glycine max
agcttgcttcttgatgaaatggctataaatgcattaaggatctatatagtattacaacaacaacccaacactgtcgatgcgtactttggaagataggtaacatctcggcattcataaagtctgtcgatctttatttggaaagatttgctccctctccgacttgggtaatgaaagcatgggaaacaactcaagatgaaacgatgactgctggtgtgttggatgctgtggatttcaacacattcggtgtgttcaacttgttcaatcattctaaaaccgaaacctcttgaacctttatgtcttatattgtggcatgctatggtgaaatggttatactataagtttaatctgaaatcacaagatgcaacctacttgtgaagtatcctaatc

SEQ ID NO: 304442 - DNA, 413 bp, Glycine max
  unsure (1)..(413): unsure at all n locations
ttcatgacttatttatgagctccttttatcttgtggccagtttcaaatgaacttaaaatgtaacattaaagatatctgataacaggaaaatcctgnggattgacaaatattacaaaggcatcactaacatatcattgactttggaattgcaaagctatctgcaaatcaaagaaaaatatcaatctctatgagtcttctgcacttttttttttttttgagacggagtttcgctcttgcccaggctggagtgcaatggcacgatctcggctcactgcaacctccgccttccgggttcaagcgattgtcctgcctcagcctcccgagtagctgggattacaggtatgtgctaccacacctggctaattntgtatatttagtatagacgcggtttctccatgttggtcatgctggtt

SEQ ID NO: 304443 - DNA, 390 bp, Glycine max
agccttacagaagtaccaaacatttgcactaagcatctgtcgtctgtcaaagatatactagtatgtgcggcgtctatggctttcctttcaaatagattgttgcgctgatttccataatcacaatccatttgcagatccatctcaatttttccaccatccaatgtacaataattacgaacacctcttgaacatgatgaataatctgtctttagaacagataacgagtttgataagttaccctcaccacaaagttccatgttgccttcttcctgtctggattctgaacagcacactctttcctctactacaacacctttactatgatgcttaccagcaatatgcagcaaatgattttcattctcaccagagataacatcaagattcaaatcc

SEQ ID NO: 304444 - DNA, 215 bp, Glycine max
agcttgtcccgttgaccatatatcgcttcctttatgagcccgatactgtggtgacaggataactgtgactacactgagctctcattaaagtcaaagagctgcggaggcaagaaggtaccaaatcatgccgctgtgaccagtgtccgcactaattatactgatcgtgaagtgccgggatcaccaacgcttggcgcgcttatctcaccgatgccttg

SEQ ID NO: 304445 - DNA, 402 bp, Glycine max
caccttctcgctataccaatatgttggctcagcgagcatccgctaagcgcaacggttatgggctaagcgcaacactcatgggctaagcgcgaggaagactctggaagaagatgagatgtacaggttcgctaaacgcaccacttcatctcactaagcacaccgcttcagtccatccgctaagcgagaaaggcacgcgctaagccaaaattcactaatgtacgctaagccggccataattgcgctaagcacatgagcacgaacaaagccacctatttaagccagacatcagattttgtgagggagtttggactgggattcagagctttgcatgtctagagattctagagagagaaaggtccaagctccagagagctcagagagattttgctgtgtgaagatcta

SEQ ID NO: 304446 - DNA, 406 bp, Glycine max
  unsure (1)..(406): unsure at all n locations
agcttaagacggatgttaaagtgggtgtgttctgccttcatctagtcacagacaagagaatgccatctgctctgatatcccaaagtaagatggtaggttcccaggcaagtctcaaaaaggtgccaaaatgtatttttgccactcttagatgaccaagcatctcatgtattagaaaagaggaagaaaggtgaggtagtggagagagtatttctttgcagagttgttgaggcactatcagtcttatccctcctcctttaccatgatgagaaggatggggtgtgctctgttgtctcctcagtcctgagagggtttcaaggagactattntaacagcttgacctatgtgagtctgtgggacatatggctgtggccatacccattcttggaaaaaactaaaaataagagac

SEQ ID NO: 304447 - DNA, 307 bp, Glycine max
  unsure (1)..(307): unsure at all n locations
ctatactgctcanaatcaccaataacagaatgctcacgatgctcaaaaggtactaaatgatgtctaactaatcaatgaaatgtcctatctatctcacgatcaaacggttgtaagtcacatggatcgcctctacgtatacactatattcatcaatgccaactattcgtcttttatccactcacaatgtaggtttgactacagctaccattgaatgatatccacatgactctgaaattctgcgagaaaccttatcaaatgatgacgaaatagcacacaaaatttcaaaccaaaattcaaagtctaacta

SEQ ID NO: 304448 - DNA, 461 bp, Glycine max
  unsure (1)..(461): unsure at all n locations
gcaagcttattggtattataacatatctactatagaatatgaatagatcgacatatatcttcagtgcactaattggtaatgaggttcaacaggaatctccacctacaggtacaattcaatcttcgcgatttttttaaaatgttgtttccaattgttacaatggagttcggaaattcttgccattctagaaatgctactgtactttgagctcaactttaattgtacagatgaaatattaaggatcttactaaaattaatgtattttggctttaaaagatactaaaaagaaaaagtatcaaatgaaggaacacgcacacgctngtataattatgtgcanattatcttgtttttggcaagtaatcgattcttgaaaaagctatgggtagaggcaatggaaatatggaatgatatccatatacttgaacaacatccagcaggaattaatttgccatatgcgatgc

SEQ ID NO: 304449 - DNA, 365 bp, Glycine max
agcttagtctggctggatatgaaattctgggttgaaaattcttttctttaagaatgttgaattttggcccccactctcttctggtttgtaaggtttctgcagagagatccactgttagtctgatgggtttccctttgtgggtaacccaacctttctatctggctgcgcttaatattttttccttcatttcaaccttggtgaatctgatgattatgtgtcttggggttgctcttctcaaggagtatctttgtggcattctctgtatttcctgaatttgaatgttggcctgtgttgctaggttggggaatttctcctggataatatcctgaagagtgttttccagcttgattccattctccctgtca

SEQ ID NO: 304450 - DNA, 396 bp, Glycine max
agcttttaagtatctgtcagggccctaatcatttctgcaacatgaatgaaatggatgaaaattaattttaatattggttttacattaatatggaagctaatgtttgaactagatcagccaaagagtcccagtgcttatctaaaaagcaagtgactaatgtatggagaaattcataattctgtactctacataccctttagcatttatttttccttctggctgtagatttttacaggataatagatgattctgcctgtggaatacctcacctgattccgatttttcacttgaattcatactcctctgactggaaaagaattcttcatttctatggcaaccagggttttgttccctgtcccctccatttaaaattccaagcagataccctttatttca

SEQ ID NO: 304451 - DNA, 546 bp, Glycine max
ctccacccctcctcgcctgttttaggcgtctaccactatacacacgccacggaatgatgatctccgacggacttaataactgagctgcagcagcctgtctatacagcctactgatggtttctattatctcgaggaccggttacgaacccgcgcttagtttatgccaatacaacggcagcatagctagcctgataaattccatacgatatcgcgggaagtatgggttatgctatcagcccactcaggcacatataaagacactcattgccgcaatgatcaatggttgtcatagctcaccgctgacactagaaagcgaacgacacccccctgcccataagtagacactttctcaacgccggtctgggagacgaacgtcaagtggctcgaatatactaagacgatgtcccgagtacattgggcttggtacgaccttgctcttctgatgtccagcagtggaatcgcacactggaggaacgaccccgccatctaagcatcgagcatgatagggacctctcacggtattaacaagctctatcatgcgggccg

SEQ ID NO: 304452 - DNA, 400 bp, Glycine max
  unsure (1)..(400): unsure at all n locations
agctttgctggtcttaccttatctccttttggtccataaggtcccagaaggcctgngaaacccctttctcctttcaatcccgataaaccagtagagccagtgaatccttgaggacctgttgggccttgaattccaattggtccaggtcgtccctaaggtggacagaaggagtgcaattagtcaatagaggacttagcattaatacttctcattttcccacgcacaaagagcactgtcataacttcactgaataattttggctaagagatctgtgaggcacgccaaagttccagacacggatcagaaaaggctattttagggattgctaagcttatttggatagaacacattttataagcacatttaataagattcatgtgcaccaagatccttcaacttt

SEQ ID NO: 304453 - DNA, 386 bp, Glycine max
agcttgccacttatgataacgcaggtttgttgttctctttatgtatgatttaaagaaaaatgacctgaataaaaaacagctatctatgtctatacctgtgtctatatttatatggcttcaaacattttatatgaatatgtatttttatatatgtgtgtgaatatgtacatattcatatacttaaaggtaagaaggaagcagaataatacaaaatggatctttccaatcatttgttcatgaaaagtgtaagtatttgcaatctcttcatactcctttaaagtcaaaaatcaatgacaaggaggtagtagagttcggaacagatacaaatcccatttgagtaatagatatacaaaagatgattgagtattgcctactgagttaatgag

SEQ ID NO: 304454 - DNA, 424 bp, Glycine max
ttgagttatcgaagaccaattgctcagtctttcctagctagatgatgaagacgatgcatgtacaatgtttagcatatatatatacatatatatatatatatatatctatatatatatatatatatatatatattacttattctcttgactatgtaactttaccaaacagacacgatctcactgataagacaacagaaattgttgagctcaatatagaagcctttgtcacacacatgacacaaggcttgagaggccatgttgtaatccattcacatatagaacatgatatatttgagttgtgcgctgaatctctatgtctccttctacacattattgttactttatgattgacaacacgagagacatatcctgcatctcttgacaccaagccagagagtatcgacttgcacccttcatgtgcgtt

SEQ ID NO: 304455 - DNA, 392 bp, Glycine max
  unsure (1)..(392): unsure at all n locations
agcttgatgaaattcaggatagcacagaaacaattcagaatactgtcagacaaatttacaaagagatttaattaatttttaacaattatgcagacattttttaaatgaaaaacttagttgacatactgcagaatgcatcagagtctcttactggcagaattgatcaagcagaagaatcagtgaacttataaacaggctatttgaaaatacacagaggagacaaaaggaagaaagaataaaaaagaatgaagcatgactacaagatctagaaaatagtcttaacagggcaaatctaggagttattggccttaaaattattggccttattggcctgatgaggtagagagagagagacggnggtagaaagtttattcagaggaatagtaacaaag

SEQ ID NO: 304456 - DNA, 429 bp, Glycine max
  unsure (1)..(429): unsure at all n locations
agcttcaggctgttcaattgcttcagattgttgcccagaacggcaaaggtctgtgtgggggtcggcagaggagcataaaccatagagtctggcgacaggtgcatattttttattcatggccagttgggttaccaggttaaccaaggcatctagtttaccttcaaacttcttagtctcacctgatgaagatgaattcgtggctacttcatgcactcttctaatgacaataacatcatttctggcactaaattgctgggagttggaagccatcttctcaattaaatttctggcttcaacaggggtcatgtctccaagggctncaccactggcagcatctatcatacttctctccatgttgttgagtccttcataanaatattggaggagaagctgctctgatatatggtggtgagggcaattagcacataa

SEQ ID NO: 304457 - DNA, 377 bp, Glycine max
  unsure (1)..(377): unsure at all n locations
agcatatcatgtttgttttatatcagtctgacactcattctatctttttttagacaaagcattcccaaacaataaagcaggacaccttatggaagttatggaaactttgcgttgtattttgggcagatattaaaagttagttaattacataataaacacataagtatatataaagatgggtaatttactttttttaatatcatgtgaaatggaaaataatggggaaagctattattttttccattcctatctacatgaacttgtccctccctttttcccgcctggaatactgtacagcctgnctgactgcctctaccactttcacctgaagaaatactactagtttaaagcccattcatttcacttaacagtcacct

SEQ ID NO: 304458 - DNA, 447 bp, Glycine max
  unsure (1)..(447): unsure at all n locations
aaatttgaattaaaacgtctagaaactgctggtaatcgattaccatatatgtgtaatcgattacacagtgcaaattttgaattcaaattctaatagttgctgtaaattagttctggccactggtaatcgattacatcctctggtaattgattaccacagagtaaatctcttgaaaaagactttttagcttaaatttcttggccaaaccttttgctacttcaattggaattctcttcctacttaatataccctttctaagattctagagactgtcttgattatccatcttgaatatctttgatttctttgtcttgaataaagctttgtgaaacatgtaatcctttggcatcatcaaaacatcaggttgatcctttgtctacaaatcttgaacttattctcttggctctttgcatcatctntgtatcatcaaactccttgaataatctt

SEQ ID NO: 304459 - DNA, 389 bp, Glycine max
agcttccctgtggaatttccctccccatttcagaatacttgcagatgtacattagtaattcactagtccttagttaatatcactttcatgttttcagggtctgagatgcatttcaggaggcagaaatggatctcaggtgcatatggctttgaacatatgattccacttcgattatagtattattacttagacatagtcttgatgtttgcccttgagcatcatttgctaaagatgactattaggttttcctgcatcatccattaagcaacccccaaccccatctagcccagctagcctctcttctacaggaagggagtcagatattctcggccaacaagatgagtaccacactaatgccttcccagtctggcccctagagaatttggtat

SEQ ID NO: 304460 - DNA, 433 bp, Glycine max
agctgatggaataatcatagttgcacaccctatggatactgtttgggaactgaagcctgagatgaagtcatatgatatctctaaattatagaacatcactacaaaggtaatcgctaatatctctgttagcagtagctattaatgccattttttaaaagcacctattaatggcattttaatattttatgcaagagaattccaatccataattggatctgggcttttcgttgctagcgtaaatgacacaaggttattaactatgatgaagtaaggataatcctcgcgatgaataaatattcctaggccacatgtctacataatcatgatttaatgccccacaatgaggacataatgcgagcaaattagctcccacaacatgctctaagacatatacttgccttcatcaaccttcttctcgcctatggctgaaaca

SEQ ID NO: 304461 - DNA, 384 bp, Glycine max
agcttgtctaactgttcctgttttcctataaataaagcaaggatccattttctattataacttgtataagagatgttcaataaatatttgttaatataacactgcataatgtataaatgtgtattttaaaattgtaggttttcaacccattaatgagttgcaatctatatgtatacatgtatgatatgcctggcacattagattttcaataaataattattaaataatggaaacgttcataaaataaattagacacagcaagtagtaagtgctgttgttatctatatccccttactccttgtccctttcaagaaaaaaataccctaaataatgaagagatttcaaatgtgcaactgtattacatggtctacaacaggagttggc

SEQ ID NO: 304462 - DNA, 386 bp, Glycine max
  unsure (1)..(386): unsure at all n locations
agcttgttgacacgcggagatntacgtcaactcttgtgctcacaagatttgtcatactgacatttgagtcacgttgacgggcggagataccccagtggttatccggataaacattctattttgctgtctgcacaacgaaaagcctgatagcacgcagagactaacgtcgctttctgcgcccttcgtcaatctgcggacgacaagaccgttgacacgcagagatctacgtcatttgccgcgctcacaagatctgtcatactgacatttgagtcatgctgacggacggaaatacccaagtggatattcgtataaacattcttttctcctgtctgcaacacgagacgcctgatagcacgcagagaccaacgtcgtcttccgcgcccttc

SEQ ID NO: 304463 - DNA, 396 bp, Glycine max
agcttatgtactaattgcctacagttgactggaaaacttaccgataacaacctgtcaattaatacatatttaatgttatatgtattatatactatattcttagaataaagtaagatagagaaaagaaagtgatattttaaaaatcagaaggagtctcaacaatgtctggataattacaaaaagagggaaagaataagaacaaaataaaatcataaggaagaaaaaatatatttgcaattcattaagtggaatggattatcataaaagtcatcatccttgtcatcttcacattgagtaggctgaagaggaggaggaggagaaaggattcatcttgctgtctcaggggtagcagaggtagaaaaggtagaggaggtgaaaggtgaggcaggagaggca

SEQ ID NO: 304464 - DNA, 85 bp, Glycine max
  unsure (1)..(85): unsure at all n locations
agcttctaaactntatacaagaattaagctctgataccacttgttagacaagtggcctcataaatcttaagaggggggggggggg

SEQ ID NO: 304465 - DNA, 383 bp, Glycine max
agcttttgggtctcgctgagtttttggctattcacttttctttcttgtgatgcccctgtgcaggtaagaaatgtgtatacctcttctactgtgaatctgcctgttgtcagtttatttcatagacttagttattgagccctcagaggatagagggaaagtcttccctctcatatagaagggaaaaggtagctccgagagtgggagaatatatttataatacatttctctaagagtacttatatccataatttataaacaaattttgaaaattaaaagagagcagtagaataagcaaaacagttgaacaattatatgtttgcatacctatgaaatgcaaatatataaagaaatatatatatctgcaatttatatgaacagaatca

SEQ ID NO: 304466 - DNA, 456 bp, Glycine max
agctcggagaggatgcttcaatggaggaccagatatatggagtgaaagagagaggggggagcacgaacttgaaggaagaaaaggcagagaagttgaactttgagttgtgtctcacaagactctcattcatcaaaggtacaacaagtgttacacatacttctatttatagactaggtagcttccttgagaagctttcttgagaaaacttccttgagaagcttctttgagaaaacttccttgagaagctagagcttagctacacacacccctcttataactaagctcacctccttgagaagctctcttaagaagatctctatagaagctagagtttagcttcacatacctctctaataactaagcttagctccttgagatgagaagctagagcttagctacacaccccctataatagctaagctcacccacatgacataatacatgataatgacaaaa

SEQ ID NO: 304467 - DNA, 390 bp, Glycine max; identical to SEQ ID NO: 304438
  unsure (1)..(390): unsure at all n locations

SEQ ID NO: 304468 - DNA, 439 bp, Glycine max
  unsure (1)..(439): unsure at all n locations
agcttgaaatgaggaagtgtggaaaggtgagacttcctacttttattcgntgaccacagagtgatacctggagatatgtcgcgggggtcacgagaccttggtgacgtcaggtggggtgctattgcccaaaaccaagcttgaccaatcccgacccaacccgggcatagtcagtcagtgagaacctgtgatgtacctaaacaggcgagctcttggcagtcaaccgattaaagaacaaagaccacagagcatggaggcttatgtggtggctggccagctgtgaatcttgagtgatatatgggatatggcctctggtaatcgattaccaagggtgggtaatcgattacaaggcttataaacgagatcaggaagctaacagggcttatggtaatcgattacaaaggggcgtaatcgattaccaggcttaaaaataggactggaa

SEQ ID NO: 304469 - DNA, 386 bp, Glycine max; identical to SEQ ID NO: 304440

SEQ ID NO: 304470 - DNA, 396 bp, Glycine max
agctctgcaacataagaattaaagaatgtggttgttgggcatctggttccatggctgctgtcgaaggagatggatgatgaatggatgtcctcagttatcgctctctttattaacgccatctgcaagaaaagaatgtagacaattacaaaaatcaagttgaaagcaacataaaggccgctaagtgagatcaaatttgcttagcataccttcacaaaacaacacataccgcttagcgaaacatggttcacttagcgagtcttaaaagagaaaggtatacccgattagcgtcctatagagctcgctatgcctaaaaccagccgcatagatatgcgcttagctctccatgagctgcgcttagcggcactaaataaagtaaattttactaagttatgggag

SEQ ID NO: 304471 - DNA, 413 bp, Glycine max; identical to SEQ ID NO: 304442
  unsure (1)..(413): unsure at all n locations

SEQ ID NO: 304472 - DNA, 520 bp, Glycine max
  unsure (1)..(520): unsure at all n locations
nttgaattcgtctcgnatgcngngatcctgtatagtctacctgcgcgcatgcaagcttctaaactgtatacataaattaggcactgtttccacttgagagacaagtggcctgatatatgatacgagggggggggcggacctttcatcggacggcgtccgtgataactcttatactcgacgctgatctctctatgaaaatctggaagggcttgaactgaccccgtcacaagcattcattagctgtactatccatcaaatcctacgcagcccagaattacaagcactcttcctatctctctatatctgtctatccatatctctatatatattgacagacagatgatacctcagtgctctctatgatatcataatatcgtcgccgcgacaacaagacatcgctctgtcgaatatcaaagactatctactacgctcccgtattttccacaattcatgaccctattgtcttcaaaccactctatatcgccattcttgttactctcccatccaactatatttatcg

SEQ ID NO: 304473 - DNA, 215 bp, Glycine max; identical to SEQ ID NO: 304444

SEQ ID NO: 304474 - DNA, 420 bp, Glycine max
agcttgcctgtccgatgcagcagtaatgatggcccgagttatgttgtggaacggttacgaacccgaagtgggtttaggcaaagacaacggcggcataactagcctgataaatgccaaaggaaatcgtgggaagtatgggttatgctataagcccactcaggcaaatataaagagaagcatcacgggacagaagagcggtagtcaaagctcgcgatcgagacaagaaggtgaaggaagcccaccctgccacataagtaggagcttaataagcgcgggtctgggggacgaacatcaagtggccgcgatatacgaagatgatgctccgagtacattggatttggtacgaccatgcccttctgatttccagctgggaaattggcgagtggaagaacgccccggcatttacgcgatgagcataat

SEQ ID NO: 304475 - DNA, 406 bp, Glycine max; identical to SEQ ID NO: 304446
  unsure (1)..(406): unsure at all n locations

SEQ ID NO: 304476 - DNA, 230 bp, Glycine max
tattatgaccaagcttttggtttcctatattatccgacgctctaatggtagcttctactcttatgacactctctccctaaccatgacgattttgaggagtctgctcattcttcatgatgcagattaaccctcatatctttacgaactaaactcagggctatcctaactctgaccactaacaaaatcaatcttcctcctacagattgcggatcgtcctgctgcatagttct

SEQ ID NO: 304477 - DNA, 365 bp, Glycine max; identical to SEQ ID NO: 304449

SEQ ID NO: 304478 - DNA, 404 bp, Glycine max
  unsure (1)..(404): unsure at all n locations
agcgttcatcacccttgcatcgactgcattgtgtggcattatccattcagacttacaatggctgcccctcctcatactacgcggaggtgagccaacagctctgatgtatacattcctttatgactatgcaaaaggtagaaaggatttggggcacaaatattcttgccttggactggatnggatctctttatttccttgagtggctcgatatttattagaaggagattgctatctaatcggaccaattttctataccttttgatttttagggcgtgtgattggatagacgggctgctcttcttgctggctattcttggcgcatgctccataatgcaacgattcacacgccttccaagcgaactatatggcctgctaataccaatgctctctatgcagtaggctat

SEQ ID NO: 304479 - DNA, 396 bp, Glycine max; identical to SEQ ID NO: 304450

SEQ ID NO: 304480 - DNA, 400 bp, Glycine max; identical to SEQ ID NO: 304452
  unsure (1)..(400): unsure at all n locations

SEQ ID NO: 304481 - DNA, 100 bp, Glycine max
ccccccccaaaccccccgcaccccctccgccccctacaccctcccctagccctcccccaccccctaagaccccagcacccccccgccccccacaaccccc

SEQ ID NO: 304482 - DNA, 386 bp, Glycine max; identical to SEQ ID NO: 304453

SEQ ID NO: 304483 - DNA, 423 bp, Glycine max
agctgtgaaccacaccaaaccctgacatgtatcatgtctagccattctacaagcttcgagccagaatactgactcaccacaaaccttgacccacggtgagaatgccactccttaccctcggaagcaaaataaagaagagaaggaaagtttccaatcataggagaaaggagaaggaaaacttccactcaaagaggaagcataaaaggagagaaggagaatttccaatcacaggaagaaagagaggataggaaattcccaatcacagagtgggagagagcataaagaacagaaagaagattcccaatcacagaatgggagatagaataaagagaagtaaagcagaagaaagttcctgatcaaagaaactagaagaaatgtgcagaaagatcttttgaccagatgatatctgaacaatacagaatt

SEQ ID NO: 304484 - DNA, 392 bp, Glycine max; identical to SEQ ID NO: 304455
  unsure (1)..(392): unsure at all n locations

SEQ ID NO: 304485 - DNA, 460 bp, Glycine max
  unsure (1)..(460): unsure at all n locations
agctggcaagtgaaatcgaattactcgacttaagtacgcaacacaaagaatagtttacactagaatcagaaggtatggtcacaagagtattctatatgaaatatatctcgatacgagtcctcgaactatagagtatcaacattgctaagaacaagaaatcatgaacaaccatactatctatgcaattaaggcaaaacaccatactactaacatacccagaattataaggttcttataataagtatacatcgcacatataagaagtaagaatttaatagttaataaggatgtattaaagaatcacaaacttcaactactacattcatgactacacacaaagtaaagcgagttaagtagtcatgcgtttacacatcaagaaagacatactcatncaagacatatatatggttcacaaggttttcacaacactaatccacacatcaagatagaaatacagtta

SEQ ID NO: 304486 - DNA, 377 bp, Glycine max; identical to SEQ ID NO: 304457
  unsure (1)..(377): unsure at all n locations

SEQ ID NO: 304487 - DNA, 447 bp, Glycine max
agctcttcctctggttgctctgctaaggtttccatgtgctagaaagaaagagaagagattgaattctccattccagtgtctgcatgtgatgagtatttatccctccctagatattaagttaacaatcccaatggagaagatgtgcgtaaatgaatcaaaaacttggtatccaaatttcacgaagatccaatggttaaaaagtctcagattgtagttttactaaaacagatttgggtatatgcggaaaaaaggaaagctacgacacggagggaatttctctcagctccgacattgtttctcatattgcaacgatgggaatctttggaaatgagttccagacttggtgctcacatttcacgacgatctaacggttaacgagtttatgatcgtcattttctgagacagagttcagtgtatgcgcgaaaaagatagggtcttgggagagga

SEQ ID NO: 304488 - DNA, 389 bp, Glycine max; identical to SEQ ID NO: 304459

SEQ ID NO: 304489 - DNA, 379 bp, Glycine max
agcttctatggaggctggatctttgagcttcaatgaggctcttcaatggtgattttccaccatggagatgcactggacgataaaggagaagacgtgagagaaggcaccatccactacggaataagcgatggaagaaggagctttgccgccaagaatgtgccttggataagaagcttggagaggatgcttccatggaggaaaagaaagagagagagaaagagagagggggggagtaccaaattgaaggaggaaaaaggggagagaagttgaactttgagtattctctcacaagactctcattcatcaaagttaccatacgtgttaacatacttctatttatagcctacgtagcttccttgagaagctttcttgagaaact

SEQ ID NO: 304490 - DNA, 396 bp, Glycine max; identical to SEQ ID NO: 304463

SEQ ID NO: 304491 - DNA, 384 bp, Glycine max
tctgactcatgacctcagctatcttaagaaggggtgaattaatttcccactaaccaccttttgacccccttctaaatgatacgctccaaatgtagaagtataagcaacaatcaattcaataatgttctttatacatgcgagacaaaatcgactgccataatataaatgagattagggaagagagaaatgctaactcactttatactatttaggacacttcccgtgcctacgtgcaattcctcagcaacccacttgaaattttccactctctttgcaagaatacttttacacagtctgaaccacatagggacaacccatccattgtgtccaggaatacttaccacttaagagaccctccatcccttaatcaatctctttgaataa

SEQ ID NO: 304492 - DNA, 383 bp, Glycine max; identical to SEQ ID NO: 304465

SEQ ID NO: 304493 - DNA, 556 bp, Glycine max
  unsure (1)..(556): unsure at all n locations
cctccccccccctccgttctttatttacattccacccacccctttcaacaaccccanccaatgattcgttacntccggatcggatattaatgggctgcgctccacttgaacaagatattgactcaagttacacgtgcaaagaagagaacacactgcattcaggctgcatggtccagactatatgctacatgaactatctatctatacgattgccttttactatatagaggcaacattgctattaacatgacttccagaccttccgttctatctatgcaaataaggctatgcaccatactactgacatacacggaatattaaagttgcataatgatgtatcattcaacatatgcgaatgcaaacgtctatggactataatggtgtatcaaagaatcaccnacgtttactactatattcatgactacacgcacagcatagtgatttttacagatatgcgcttacgcctccttatatcatgctcctacaagaaatatatctgggataaactgacatatgactactctcctgacaagaagagagtagatgattgattacg

SEQ ID NO: 304494 - DNA, 390 bp, Glycine max; identical to SEQ ID NO: 304438
  unsure (1)..(390): unsure at all n locations

SEQ ID NO: 304495 - DNA, 386 bp, Glycine max; identical to SEQ ID NO: 304440

SEQ ID NO: 304496 - DNA, 413 bp, Glycine max; identical to SEQ ID NO: 304442
  unsure (1)..(413): unsure at all n locations

SEQ ID NO: 304497 - DNA, 215 bp, Glycine max; identical to SEQ ID NO: 304444

SEQ ID NO: 304498 - DNA, 397 bp, Glycine max
  unsure (1)..(397): unsure at all n locations
agctntacatggagctacatcatgtggtatcagagcatcttcatctaggtgatgctcttttgcttcctctatcttttgttcagctaattcactttgattccttgctcttcatcatcttctccatgtatctcctccattatcttgtgattcggtattgtctagagtagattcaaaaaaataaactgactaaatcttagatttacacttgttcatgcattctctatggttcaaattttatagatctactcttgaatcatgcttttgcgtctgattctacgttctatcttttttcagaaataatcttcttgtgctgagcctttagatatcaactttcttaccaaatattgattacaaaagaaaacaccaaaatctaagtgcaaaccatttgattcatgtt

SEQ ID NO: 304499 - DNA, 406 bp, Glycine max; identical to SEQ ID NO: 304446
  unsure (1)..(406): unsure at all n locations

SEQ ID NO: 304500 - DNA, 294 bp, Glycine max
agcttgaatttgaacaacagaagctcttgagatattctaatggtcataacttatcacacggaagtccgattcatgcgcataatatatcgagaccctcgaaattgcactacggaagctctcacgaaacataaatggcgataacttttcacacggatgtgcattcaagtgcataatatatagagaagcttgacagtgaacaatggaagctctctagaaatatcaatggacataacttatcagacggaagacgcattctggcgcacattatatcgagacgctagcaattgcacaaag

SEQ ID NO: 304501 - DNA, 301 bp, Glycine max
  unsure (1)..(301): unsure at all n locations
aaaaaaaaaaanaaaanaaaaaaaaaaannnaaaaaaaaaaaaannnaaaaaaaaaaaaaaaaaaannaaannaanaanaananaaaaananaaaaaaaaaaaanaaaaaannannaaaaaaaaaaaanaaaaaaaaaaaaaaaaaaaaaaaaaaaaaaaaaaaaaaaaaaannaaaaaaaaaaaaaaaaaaaanaaaaaaaaaaaaaaaaaaaaaaaaaaaaaaaaaaaaaaaaaaaaaaaaaaaaaaaaaaaaaaaaanaaaaaaaaaaaanaaaaaaaaaaaaaaaaaaaaaaaaaaa

SEQ ID NO: 304502 - DNA, 376 bp, Glycine max
atcttaagtcactgggctgcagcttaaccaggggagatggaccatttcaagttcttgactgaatcaatgaccatgcttacacagttgagctgcccggagagtataatgtcatctccaccttcgatgtctctgatctatctctattctatgcaaatggacaatcctatttgaagatcaactcttctaaagagggagagaatgatgatgacatgaccaatagcaatggacaagatccacttgaaagacttggaggacctattgatgaggacatgaccaagatctatggcaatgatccacttgtacgacttggacgacctattacatcgtctatagcaaggaaagccaatgaagctcttcaacacatgcatgacatact

SEQ ID NO: 304503 - DNA, 365 bp, Glycine max; identical to SEQ ID NO: 304449

SEQ ID NO: 304504 - DNA, 449 bp, Glycine max
gctgtaagacattatgcaacattgttttggatattcaacatgaacatcccatttcttgacgttggtaccttcgcgattagattgcttctcctatctctgatggaaagactggaatctttcattgaatatcatagcctttattgagtaattgacccaaactcataatattattcttcatatttgggacatagtagacatttgatatgaattcatgtcttccatctttcaaataaattaagatcttacattatccttttacaagaatcttagaattatcaccaaatgagacattgtcacttactgattcatcaagatccacgaacatgcttcttttctacacatatggttgcttgcaccagtgtcaacgtatcatgtgttgtcttggctaccttcattacatgcacatgctagaagcactatttcaaacttcttggctttttgctccacat

SEQ ID NO: 304505 - DNA, 396 bp, Glycine max; identical to SEQ ID NO: 304450

SEQ ID NO: 304506 - DNA, 398 bp, Glycine max
  unsure (1)..(398): unsure at all n locations
agcttgttaacgagataaaattatgattacgaccaatcaaccactctcatacatcgccaactcgaaactcgataatctatctgtattgctattntataatagagctcccacataagagagacagaaagacataaactagtctcttttgaaaaaaaaaccaagaaagaaaagagaaactgacaaaaataattagctttggagttggtacagaattcttccaagttaactagaaactttgaattcaaaaccagtacatacaattaatatgccggtggtacaagcagatgattgaattctttaagtaagcttctatgtttgaatcttataaataaaaaaaatatgtttaaaatgaaaaattctataaacaaagatttcttaatggacattaattattaaca

SEQ ID NO: 304507 - DNA, 400 bp, Glycine max; identical to SEQ ID NO: 304452
  unsure (1)..(400): unsure at all n locations

SEQ ID NO: 304508 - DNA, 298 bp, Glycine max
agcccttgaggacaggattgctactttgtcagcaataataacggccaacagtgaagcttttgatgaaattgtttctaatcttaaagagcgtgtgaacaatgtcacgactggcatacaaactataagctggaaagtttctgatgactgtaaaaatttcgaggacagtatctctaacatctcacacgagctatgggttgcaaacgaccatgtgagggagatgaatacggaaaaagagcagctaatgagagacaaaaaccacttggtggagcagctgcagattaaaaaagaacacgaagtg

SEQ ID NO: 304509 - DNA, 386 bp, Glycine max; identical to SEQ ID NO: 304453

SEQ ID NO: 304510 - DNA, 259 bp, Glycine max
acctcttcctttacatgaccattaacgaatttggtgctcacattcatttgctggaactcacagacaaaatgagctactaatgccctaactacgtggacagaatctttcttagatgtaggagaaaaagactctgtgtaaactcatacttctatttgagtgaaccctttggcatcaaacgctgccttaagtcacgcaatgaagccttgcgagtctttattggttataaaacgcatctacatccaatggctattacaccact

SEQ ID NO: 304511 - DNA, 392 bp, Glycine max; identical to SEQ ID NO: 304455
  unsure (1)..(392): unsure at all n locations

SEQ ID NO: 304512 - DNA, 437 bp, Glycine max
  unsure (1)..(437): unsure at all n locations
agctatgcaagatggcttcatcttcaagcttagttctctctcaggctatccacagccaagaacactaaaaaaaaactcaactccccctcagaaatcgtgatttcatcttaaatagacaatcctgtcggtgggcgcgcacttagcggaagatgagctcgcttagcgcgcgttagtgacttctggcttagcgctagtcacactcgctcaacttggaggtgaagacaatgcgcttagcgagttgtgcttgttcagcacctctatacagctcatccttcttccaaaattgtccgcgcgcttagccattatatggtgcgcttagcggatgacgcgcttagccaaatgatgagtggcttagtgagttcatgacatctgcactccaccaatcttgcctatnttacctgagattgaagtggaatgatcattaaatacacaaaact

SEQ ID NO: 304513 - DNA, 377 bp, Glycine max; identical to SEQ ID NO: 304457
  unsure (1)..(377): unsure at all n locations

SEQ ID NO: 304514 - DNA, 677 bp, Glycine max
  unsure (1)..(677): unsure at all n locations
ctcccactctctcacacttctaantggttactagtgatgttcttctcagaccctgttgacactccanctccaccacagcaccacacncaccncaggnattttganatcgaatttcccttctcaganaccccgcgatacgtntagcataagagnatcgcacgcctgctaagcatntgtatgagagagtaatgatgatggacgatgtgatgaatagtagacatacacatcacacaagatgtgtggcgcactcattactgagagtcatgatacgtcttgaagctgatnatctcgcatagagatgagtcaatgagatataatntacatgcgacatcatcatgagccctcttatatgatagcactagagcgcccgcacaaacatacgtatggaaacatagaatggctattcaaataccacttgaatgagtggaggccaatcatggagccaaaatttcactaattatgattagtctattataactatggttcaacccactaatcctagaacaaggccatgatacttcactaagagagcttaggacgtgcgacgcatgtacagctttagatacatgcaccacaggtgacgtattgagtgtgtactgcggtagatcaagtacatgctcatgctacacgtcttaatattaaatggattgcgcttctctcaatacaattcatctacn

SEQ ID NO: 304515 - DNA, 389 bp, Glycine max; identical to SEQ ID NO: 304459

SEQ ID NO: 304516 - DNA, 229 bp, Glycine max
acctcacatacacaaacaaacgaggagaaacattattacgagctcctatacatatattctacaacaccttttcacaagtcaagatctctctgtatatctcttcatgacgtcgctcatgacatcctcacacctatctccttctcatctccttgacgaacacagccatctgaatacaatccctcctacacaagttgatgataatcacacaacttacacatttctcacatgg

SEQ ID NO: 304517 - DNA, 384 bp, Glycine max; identical to SEQ ID NO: 304461

SEQ ID NO: 304518 - DNA, 399 bp, Glycine max
agctattgataatatcttacgtgtcataagagagtcaaaagtcctaattacaattcctatcacatacctgtccaaagcaccacaatgttgtctttggttaaactcttgaaatttgaaaataaatattttataacaaatgctaacttgtgctctaagaacattagttgaggaatttaaagtagaaattatttttactagaaaacgaaaaattatgttcccattatcttattacgcttttatgatttaggcaataaatatttttctcttttaattctttaatcaatgtcttaagtacattacttatcaatacctatattctatttatgctctagacagtattcattgtattcgacaaatactttttttaattttaaataaaatgtgtggggatgttagttt

SEQ ID NO: 304519 - DNA, 396 bp, Glycine max; identical to SEQ ID NO: 304463

SEQ ID NO: 304520 - DNA, 425 bp, Glycine max
  unsure (1)..(425): unsure at all n locations
taacaccttggttctacctcgtgatgacctcgaacatgagaaccattctacggatccacaatcaccagaagtataactattcctgtgcactgatcctgtanaataaaattggttgtgaagaccaacactgctgaactagaatgcgatcacgccacctgctgattatatggaagttcagactctgggcctgccatcactattagatcaagcacatccatcattgaggttatgctatgactattgaaacccgatcaccttttgctcgtctacaattacatatgactcgctgctattgcaccatgcctgcgtagcgctcgactacaggcctcttggcataatgtatgatactgcttaacgaacagcttccgtcatgaccatactggagtgggctcggctaagtcacatacttaccgagcttatatccn

SEQ ID NO: 304521 - DNA, 450 bp, Glycine max
agcttcaaccaattaacattgtttgaatgacaactgttgtagttggacaacaatcacatagtttgtccaccatggtatgctttatgttcctattggttatagctctggtatgctttatgttcctattggttatagctttggtgctagaatgttcaatttggagtccacaagaggaggatctccatatggtgctggagtttttgctggagatggtacaagacaagcaagtgaaatggagctggagcttgtagagtatcatggcaagtatatatgaaattagcccataaaagctagattgaattctgcgattataaattcattaagccctcctagccaggtcagcattctagtctgtcccaagttggtgacctctaaatcaaacttcttaatgcactcaaacaaaccattggtgacctcacaatcaaacttcaagtcagtgttgtcataaaa

SEQ ID NO: 304522 - DNA, 390 bp, Glycine max; identical to SEQ ID NO: 304438
  unsure (1)..(390): unsure at all n locations

SEQ ID NO: 304523 - DNA, 431 bp, Glycine max
  unsure (1)..(431): unsure at all n locations
agcttncatcagaggcggcgggcccgatgacatgctggaaccatntggtcccgcactttntaaataattctgctatctataagactcagggtccgatgacatgcggcaaccacttggtcccacacctttttgctatgtataagactcaaagcatgatagaacgcagagactaatgtcgtcttctgtgtctttccccatccagaggcgacggtcccgatgacatgcgggaaccatttggtcccgcacttgcttttgctatctataatactcaaagcatgagagcacgcagagattaacgccgtcttctgcgccttttgtcatccagaggcggctggcccgatgacatgctggaaccatttggtcccacacctttttgctatctataagactcanagcatgatagcacgcatagacgaacgctcgcttctacg

SEQ ID NO: 304524 - DNA, 386 bp, Glycine max; identical to SEQ ID NO: 304440

SEQ ID NO: 304525 - DNA, 625 bp, Glycine max
  unsure (1)..(625): unsure at all n locations
cactccacccagtcaactcnctcatacgtatangataaggtgttatgtctanatactgcttatacacnnntatccaacacgcccgcccgcaccncaactttggagatcgtagttggacngcgtatcctatanagcggatctgtatgcatgcaagctgtgggcatgttagcgtntgtgggaanactgtatctgtattcactgtagctctcgaatgcacaatcgagatggttcaagcacaaatatatatatgttgttgtcggcttgccacgcataaatagtttttatctgttcagattaagcatacacttgctcatgcgacgacttcacatactcaactatatcgcgtgcatgcttatgcttaatcataggaatggtacgaatatgcgactaatattgaggagcgagtagacttaatccttattctaggtcatatggtgagacaaaaattgcgctaagtgattgcgcgattataatcaaactcgacatgaggctaacaggtttctccaagacttaacatttcactttgaaactgatctaagcagtgagcctaatgccctatagactacttcacgttgaacattacttggtgggtgacagtagtgcacatacacactcacttccattt

SEQ ID NO: 304526 - DNA, 413 bp, Glycine max; identical to SEQ ID NO: 304442
  unsure (1)..(413): unsure at all n locations

SEQ ID NO: 304527 - DNA, 311 bp, Glycine max
gatgtaaatacatgtatatctatttaatgatgttttatgtgttccctatgctatcagtacgtcattgcagtgcgcttttgccttgatcacgtatatgcatgctttgctaagatccttcacgtagatgcatgctgtgctaagatcgtactatcaattcaacaaagaccacggtggacctttcaacaggccgcttaacaacggcctatcatcttttacaggacaaccaagctggaggagactttgactcaattcatgcaggtgaccatgtcaaatcacacaagcactgagtcaacaatgaagaaccttgagat

SEQ ID NO: 304528 - DNA, 215 bp, Glycine max; identical to SEQ ID NO: 304444

SEQ ID NO: 304529 - DNA, 577 bp, Glycine max
  unsure (1)..(577): unsure at all n locations
ccacctcccccccagctttaactccagcaatacaagagttttggcgcgtacacattacactcaccacgcgcngcccgcttggtatcgtcgcantnncgagacctncanactcactgcagcacgcaagcttcanctgacttccagtaaatctcttcaactataatgccttactgccatccagtattaggacatatccaagtaaagaaaggaacacaatctcgcccgacggcctcaaagggcatacgcggcgcactcttcctacactcaaactacgttcgagttaacaacaggcattgataaacaggttgaatatagattgatatatctattatgactattacacagacatattattcctacataccattccaagaagaaagtgaaacgggtgagaaagatggtagctactgcctgtctatagaatacaaacatgacattgctcatgccatgatcgaatcgccctcttgagagaatgaacatatcagcatatatggctcgccccagaaccacaatcacaaacggtcgatcctatcattttgactaccctggcctcaatgcgactaacatcgtcgcatcg

SEQ ID NO: 304530 - DNA, 406 bp, Glycine max; identical to SEQ ID NO: 304446
  unsure (1)..(406): unsure at all n locations

SEQ ID NO: 304531 - DNA, 109 bp, Glycine max
gacttaatgaagggcgcactgcacaagggagcccataatgtgatcttgccctagctgaatacctgcattataaatctggccatgatgccgaaaaatggccgcactttgc

SEQ ID NO: 304532 - DNA, 365 bp, Glycine max; identical to SEQ ID NO: 304449

SEQ ID NO: 304533 - DNA, 604 bp, Glycine max
  unsure (1)..(604): unsure at all n locations
cctcctcaccgccgcatgcgcttattggatttgcacgctgattcggctagccacannntatatnaaaaannacaaacgcgaccaccacgagctttggaatcgtagacactctcgancccgcngatcatctacatacgactgcangcatgctagcttgtactcttgcgcagcacatcatgtacctttcctgaccgtgttgatggtgatatgcacacgcacagtacacatacctctggaatttcctgacgatagagtaggcacttttcttcacaccacttctgacatcacataactaagtccacgtctcggctacgacctctttattgtgccctcctgatgagatgctgttcttcagagaggaagagcagacatcgatgccaactgcccagcctgtgaaacgcgtatctgcagtgaccttgtgtgatcctgagtcgaactacaaggcggacatacatattgctgactctcgtgactctcacggcgagagtgtaccatcgatgtaacgtgctgtgaggcctcggaacgtaaggttctcgctctttgtgcctaatgagagccgttatctccatagagcgttgcatcgttcgactgcatatattcaccg

SEQ ID NO: 304534 - DNA, 396 bp, Glycine max; identical to SEQ ID NO: 304450

SEQ ID NO: 304535 - DNA, 610 bp, Glycine max
  unsure (1)..(610): unsure at all n locations
ccgacctctccacgtcctctctaactantcanatagatagtanantagcgaaagtgatatactctatcagatatacacaccatcacaccacaacgacaccgcnatttgaattgtagatcgtctcgttacctgcgatacntacagcgacctgccagctgcaagctatggagaatccaagagccaatgctggttcttacttactcgcacctgattctggctccaatctctcagtgggcttatcttctgcgcgcagcatcttgggatgttcccagcctttgatgacagctctccaggatctgctatacacagagttgaggaaggcccacattcgtgcattccagtattcataggagggtccatccaaaataggaggcacgagcactggccctccttccttctgcatgttcatgagaatatatcttcctagatgtcactcagtgagtatgagcgcctgccctgataccaactgaacatcctgtaccggcgacaaacgtcgacacgatgtcacgacatctcgcactaagcatgccaactgtccatgactgtatgaacagattcaccaataaattacacgcgacaatcgtaacacccctcggtgcacctcacctcg

SEQ ID NO: 304536 - DNA, 400 bp, Glycine max; identical to SEQ ID NO: 304452
  unsure (1)..(400): unsure at all n locations

SEQ ID NO: 304537 - DNA, 621 bp, Glycine max
  unsure (1)..(621): unsure at all n locations
ccactcgcactcacaccacataantacattanttcgctctaaatggcgactgccactgcgtactcgccttncnacctcntcatccgccgcgcgnaccancncttggaatttggagactgttatccnttgccgggatccgngatancntacagcagacctgcaagcttgcagcgctcctggacatacttgatggactatcgcgctcgacagaacgacctatgacaatgggagagggggctagacgcactgctctcatagctcagcctaacgcatagagaaacttactttagaagatacataaagaaggtaggaccacatctacacatacctctctaatagctaaggatagctcccttggatgagaacctacagcttacctacacaccacgtataacacttaatctcacacctatgaccaaagacatgaaaatcaagaatgggggccttattacacagacgcctcagaacgctccgaactacatcgctgataccctaccatactagaacggccattatacatggcccatacgaaggaggtgcctgacctagtgtttacaaacatcagcgggctcatacatagcccatgggctccataactactcctaagctcatgagaaccct

SEQ ID NO: 304538 - DNA, 386 bp, Glycine max; identical to SEQ ID NO: 304453

SEQ ID NO: 304539 - DNA, 438 bp, Glycine max
agcttgttaccttattgacatttaaattaatactagctagtaaagggtgaaattaatcatttcttcacaagagtgtgcaaagatgttcgaatcacctgtggtggaccaccgacatcatttgtgcaatagagcctggcatcatcaacaagtttgcaaaatcttggaaatgcattagcaaatcttttgtgagatttcaactgtgaattcacccttactgccctacctgtcataatagctctcctcgtaaaattccaatggcaagatgttaacctgtcatatatatatatataaaaccaattcccaaactagcaacacggatgattccacaaagcatttatacctaatgcctctaacaacagcaagatagccatcacaaaccacaccaactagctcaattctgtaggctttcgcgtgcgcgatctcattacaattttctct

SEQ ID NO: 304540 - DNA, 392 bp, Glycine max; identical to SEQ ID NO: 304455
  unsure (1)..(392): unsure at all n locations

SEQ ID NO: 304541 - DNA, 411 bp, Glycine max
  unsure (1)..(411): unsure at all n locations
agctnttaactaaattagcaacgctcaaattgattnttaaatggtataatcgattacaatatattggtaatcgattaccagtgtatctgaatgttaaaattcaaattcaattgtgaagagtcatatcctttcataaaatgctttgtgtaatcgattacatggttatggtaatcgattaccagtgacaagttttgaataaaaagtcaagagatgtaactcatccaatggttttcaggtttttctcaaggatataactcttccaatggtttgcttgaccagacatgaagagtctataaaagcaagaccttgacttgcatttcaataactgtttagaaaaacttttagaatttcttgaacaactnttgagagattgtgaaacctttgcttcttatctttcttcttcttcctttg

SEQ ID NO: 304542 - DNA, 377 bp, Glycine max; identical to SEQ ID NO: 304457
  unsure (1)..(377): unsure at all n locations

SEQ ID NO: 304543 - DNA, 464 bp, Glycine max
agcttcccaagtatttaagttcttcctcaaaactatcctaagcaaagttcccaatgtcctattaacaacttccatttgcccatcggtttgtgggtgacaagtagttgaaaataacaatctactgcccaacttgccccacaaagtcctccaaaaatggcttaggaacttagagtccctatcactaacaatgctccttggcaaaccatggagtctcacaatctccttgaaaaacaaatcagccacatgggaagcatcatcaacttttttacatggaataaaatgagccattttagataacctatcaacaaccacaaaaatggaatctctaccactgcttgtttttggcagccccaaaacaaaatacatggataaatcaatccaaggatactccggaattggcaatggagtatacaatgcatgacgctgtaccttagactctgcccttttacatacaatgcaatgtt

SEQ ID NO: 304544 - DNA, 389 bp, Glycine max; identical to SEQ ID NO: 304459

SEQ ID NO: 304545 - DNA, 465 bp, Glycine max
  unsure (1)..(465): unsure at all n locations
acctgcggcatgcaagcttccagatatggaaagctaaatcctctgttggttctttcttgtaggtacttgatgtaaatacatgtatatctatttaatgatattttatgtattctctatgctatcactacgccatttcaatgcgcttttgccttgatcacatagatgcatgctttgttaggatcattcaacagtggaaactggtctgattcttagaacttgataggatagggctagtttatcgcattatcacgaggtatcgcggtacggcaacctagttgttcgtatgctgacttaatgcggttctggtcgagttcactccaacacgatgaatctgaggacaatgcttgattangattangctagactctcatgacgaatcggggtctagcattttacgagacaccatacaacacatgagcattgttaagtagagaatatccttataacatcatgcacctactatga

SEQ ID NO: 304546 - DNA, 384 bp, Glycine max; identical to SEQ ID NO: 304461

SEQ ID NO: 304547 - DNA, 227 bp, Glycine max
gcttattccttatctagagtagctgagcacaacatcttactactgacatgtaatggactttaggagtggacaatggagttgagccttgcatcttgcatagtcatgttactaagttagccccgataaaggaatagcttccactaaagctggctctttgtactctatcaccaacatagtgaacatgctaatagccgggaagtctgaaactttctcttttgttgaacata

SEQ ID NO: 304548 - DNA, 396 bp, Glycine max; identical to SEQ ID NO: 304463

SEQ ID NO: 304549 - DNA, 569 bp, Glycine max
  unsure (1)..(569): unsure at all n locations
ccccctccccactcaatctaagctttcgttttcattgtctacatccaacaccccccacccccccgaattgaatcgttacttcgcgaccttaagnnactgncagctgcaagctctaactctactccatttcatttcctcgcattgacacttaaccgctccacaccgaatccaatgtatgcatggcaatgacttttgagcacatcgccgtttcgtgatgataatggcgttaccttttgatcgacgagtgctattgacaagcttcaactcgcaacttgctctgacgctgtctatgcgctcgtatctattctgtatattgtctggagctgctcgaatgatgcattgcgctatcgaaatatataaaatgctgatacttggataaagggatggactaatatgcacattggtccttcatcattcaccgcctggacttgtaccaaagagtacagatcccctctcactccaatcctacggactaaaactacatcttgctgtgcgaacttgccatagcaaacaacgatgccctcacgaaaccactcatatctctacctgcacttcaatatctccaccct

SEQ ID NO: 304550 - DNA, 383 bp, Glycine max; identical to SEQ ID NO: 304465

SEQ ID NO: 304551 - DNA, 436 bp, Glycine max
agctctatatcgatggtgtcgttctgagagatgattagcataaaggggtaatggaaaatctcttagttggcaaggtgatgaaacaagtcctgagtgctggggagagtttgctgaagtatgagatccctgcggttataaaaggtatgctagtgaagcaaatgcaacacaacctttgaattcgccaaaaacaacatccattcacttgttcctttttgtatggttccagaggataaattttgttggttgcgggacaatgaatttgcaagacagaccttagctggggtcaatccagtgaatattgagctgtcgaaggtagtttttcatacctgtataggaagaaattattgtgtggtactgctcatagctccgtcaatttccacgtaacacgccaccaaactcatcaatttacgacaaattaattatgtattacgtggag

SEQ ID NO: 304552 - DNA, 390 bp, Glycine max; identical to SEQ ID NO: 304438
  unsure (1)..(390): unsure at all n locations

SEQ ID NO: 304553 - DNA, 434 bp, Glycine max
cgcttgaaggtctgtaacccaccatcttctcatagtagaacaccggcaacgtgtctactatcattgctatcatctccttttacatcattgcgggcgccacttgagctgacagatccctccacctttggacgtattctttgaaagattcatgccccttttcacccatgttttgtagctgcatcctatccggagccatatcagaattgtactgataccgtctaacgaaggcaaccactaggtccttccaagaatggactcacgaaggttgcaaattattatactaggtgacggctgccccagtacgactttcctggaagatatgcattgagtagttttgatcttttgcgtacgcctccatctttcgacagtacattgtcaagtgattcttatggcaattagcactcttgtacttatcgaaattcgtgaccttgaac

SEQ ID NO: 304554 - DNA, 386 bp, Glycine max; identical to SEQ ID NO: 304440

SEQ ID NO: 304555 - DNA, 251 bp, Glycine max
cctgacatttcacacatacatatcaaacgttacaagacaactatatctgctcgattgaatacctcacccactcgagtgtatcacacaattatggctattctctaatgaaacactctcgccttttaccactctaattccccttgagttcttacgcaattcaagagattatgtgcacaacatagaacaattcatcaatatgcgtgaagcaacgctagacaatgaaaacgttaacccagaaaaaggctaacaat

SEQ ID NO: 304556 - DNA, 413 bp, Glycine max; identical to SEQ ID NO: 304442
  unsure (1)..(413): unsure at all n locations

SEQ ID NO: 304557 - DNA, 449 bp, Glycine max
agcttcccacaatgtggatcatcctccagactctgtgtgtcaagggctaccctccaaacctctccatcatgccagacaacagcatctatgacaggccctttatcatcatagctctacaacataaaacagcatttccttttcaatgtaaggaattcaagttgaaaaaactctcagtgggagcacaaacacaagtataaatgtctctttcagttcgagtcattgagacgagtcagagggagaaaacacaagaaattcattgtttatgtgtggccagatggaaaagaaaattcaacattatttcatacagagacaatcattctatcaacatcctcattccaccacttatgagtgtcctataatgatataaatgcacatcaattggtcattacctatttcaaggacaggaaaagacacacatacccgaagagcaacctatgaagatgacatgc

SEQ ID NO: 304558 - DNA, 215 bp, Glycine max; identical to SEQ ID NO: 304444

SEQ ID NO: 304559 - DNA, 262 bp, Glycine max
gcttctcaaatcgctaatatatggtttgcatctcctctgatatggacaactccgcctcacataacccttgatctgaataactgagcctacaccaatgtcagacgctaatttcatccgggtataatgctcgtatcattcagatatgatggtatgatcactgctaatcgaattaccgtgtttggcatcggttacagtgcacaaccaacgggtatcgcggtgctttgatagttgtttgtcattttcagaaacataagcctccatg

SEQ ID NO: 304560 - DNA, 406 bp, Glycine max; identical to SEQ ID NO: 304446
  unsure (1)..(406): unsure at all n locations

SEQ ID NO: 304561 - DNA, 274 bp, Glycine max
agctcataatatatcgatacgctcgaaattaaacatcgaatactctctggaaattcaaatggtcataactttctacacggatgtccgactgcagctaatcacatatcgattcgctcacaactgaacaacggaagctcttgagaaattcaaacggtcctatctttacgcacggatgttagattaaggcgcatcatatataacgacgctcgaatttgaacaacggtagctctcgagaaactcagattgacatcacttttcacactgatgtccaatt

SEQ ID NO: 304562 - DNA, 301 bp, Glycine max; identical to SEQ ID NO: 304501
  unsure (1)..(301): unsure at all n locations

SEQ ID NO: 304563 - DNA, 593 bp, Glycine max
  unsure (1)..(593): unsure at all n locations
nacctgtgtcanccccctcccgcactcgctaggtaaactcgtgggcagnttctacgacaccccccaaccacgcgacnccaccttcgaatttgatttgtacaccgttctcgncaccgggatatatacatcgactggagcatgcgagcttgaagaagaaataagctacctctctttaatctatgcttaataatagtagtacagcagcttatagcacgacggtatcttacgaagttttgtgtgggaatgatagccgacgtcccaagtacgcagcatgtacgttctttgtgtacagtacggctgtagcaatgctacaggcgaacatcaattggaaaacagtgatatttacctgaatgtggtctctattggattcctacccccatgtatgagagagagaaggagtctgttggtaatgtgcatgtatgagaaacgtgcncaggtatttatgcttctctgctcgagagttctatcactacgtacggaactaagtagaatggttcgatgttgaaccctatgcccatctcaatcattcatttattttatcagatcataactaacatggatagatcttaattggtttcaataccattgcaccg

SEQ ID NO: 304564 - DNA, 365 bp, Glycine max; identical to SEQ ID NO: 304449

SEQ ID NO: 304565 - DNA, 586 bp, Glycine max
  unsure (1)..(586): unsure at all n locations
ccccaccctccacccctccgaattgaacgtatgtgttgtcactgctccacaacccaancaacaccaagacacaccctgacttcgaatcgtagccctaccganaccgtgacatcnacatcgactgtggactgtatattatacgcaatctctacaccataactgatattctccgaacaccaacgagaatgcttacataatcgtctgtcttgctcacctaacgcgagataaaccactgacatgaaacatcgaacctataccacggagacagcctaataccctccgaatacagagtcgacactcttcacatactagggtcgcatcgttgcacacaggagcaccgcgcatcgcaccacatacgcctcatgaccaaacagatacccaagcgtctctaacaatatcgctagcaacaaaggcgaccgtcacggagcataaagaatatccgaacaatctttcctacccactgagagcaaccctgcctgaccattgcatgcctttactgaacccatacaaatccatcgcccaacgcgccaaaagaactcgatggaccacattatcgaaatgaacacccacatccaatcaacaaacg

SEQ ID NO: 304566 - DNA, 396 bp, Glycine max; identical to SEQ ID NO: 304450

SEQ ID NO: 304567 - DNA, 400 bp, Glycine max; identical to SEQ ID NO: 304452
  unsure (1)..(400): unsure at all n locations

SEQ ID NO: 304568 - DNA, 448 bp, Glycine max
agcttgtacttgagctataagctctggcctttatgttgttcatcatgtttctcatgttgctctgcctatctctaacatattttcataaattctacatgctaccctatattttcacacctaacaaactcatttttaaagtcaaatctttaacacaaccagtccatgcaaccatagcagccaatttattttcgtgacaatttagtccaaaaagaaaaattccttaaacttgttgtgttcataacttttattagaaagcttcaatttatgtgaaatttaaggctaaccctacagtttgacacccaaggaactcattttttaccttacaatttcaaaataaataacaacatatctacagtttcagtcagggtagtagctacgaattttgaacatcaaaacaacattcaatgaaacttagctctcaaagacaacaagaatagggttcaagaat

SEQ ID NO: 304569 - DNA, 386 bp, Glycine max; identical to SEQ ID NO: 304453

SEQ ID NO: 304570 - DNA, 449 bp, Glycine max
  unsure (1)..(449): unsure at all n locations
agctctcaacaagagtcttcacaaataactatcatgaagcagataactagcaaaactacccatcatatctcccaaaaccccatacccacgaaaatcaaaggagaaagaagtccacccacacctgaaattttgaagtcccactcgtagacacgcacttcacgactccgaaaatgccctcctttcgcgatttggagcagaaatgatggccaaaggttggagctttgttgggcaacaatggtggaggaagaaaagaagaagaaggctgcgtgagagagagggagagcttctgaaatttcttttgggctgagtgaggagagagagagagatgctctctggttctaaaaagggttctctctttntctattatttcatttaagctatgccacatgtctccattcgagtggcgcanaaagggcccactttctcttttgacgtgacccatactcagc

SEQ ID NO: 304571 - DNA, 392 bp, Glycine max; identical to SEQ ID NO: 304455
  unsure (1)..(392): unsure at all n locations

SEQ ID NO: 304572 - DNA, 377 bp, Glycine max; identical to SEQ ID NO: 304457
  unsure (1)..(377): unsure at all n locations

SEQ ID NO: 304573 - DNA, 417 bp, Glycine max
  unsure (1)..(417): unsure at all n locations
agctttangcactatagtaaattaataccgaatcttcaaattgaaaagtgaactgccctcaacaaataatgaagctcccttgagggctcacataatggaaccaaaccaaaacagctctgacaccaacaagtgaatttaagatcttgatagaaatcggagagatcattgagaggatataatttgagagaagcaagatccatgagaaacacaaagaaattttgatcaagaataatagtcatctgaagtacaatgaagacgagaaaacaaaatttaaagaaaatactatggactgtcaaaaaccagtggcaacctaagatgaacctaagtctccatacttgaacaaacaacatgatagccaacgagaatatttacaatgatcaactagtanatccaaactcgaaaatataaactcctcat

SEQ ID NO: 304574 - DNA, 389 bp, Glycine max; identical to SEQ ID NO: 304459

SEQ ID NO: 304575 - DNA, 435 bp, Glycine max
  unsure (1)..(435): unsure at all n locations
agcctttataatttataacaaaagaactatgattatcgaataatctactcatgttgtctttatgagactaacnctataaggccaagacagtacacacttgatgatattatagattctttagaatacatgcatattaatgaggaagtgcacaacggcaaaggaaatggaaatgattaagactctcaaattgatgaatctaaaacaagtaccggtcttgcaagagagtgtacaacttcaagatagcatcctcttgataatatcatcggcgacttataaaaagggataacaactcgacactctctcacagatgttgataattgctaaatatgagcaatttattataatacaaatatattggaaatatcttttacaatatttatttagcaattatgtttggcttaaatgataagaattaatattcttattatttatcgc

SEQ ID NO: 304576 - DNA, 384 bp, Glycine max; identical to SEQ ID NO: 304461

SEQ ID NO: 304577 - DNA, 442 bp, Glycine max
cgcaagcttaactatttgtaaaatgtcatatctgaactaaatcatgtctgcgttaataagatctgtcttagaccagtacaatcatatgcatcaaagtttgaaagccttcataaaacatgaaaatgattttgtgcatgaaaagttggaaacaacgtgttgaaaaaacactttctaaacatggcatcctaaacactgtcattttgagtaacaacattctgagtactgtagtcagcacaacaactttctaagtgttgatttatcattacataatttgtggtttcataacaactaacagatatgttgatttatgtgatgatcttctgaacatgagcaaatgcacattgacattaggttttcatactcatatccaacatttaataatgagtgttgtgactaaccacttaaaaattcgaacttcgtaagtgcttggacctttgtgtca

SEQ ID NO: 304578 - DNA, 396 bp, Glycine max; identical to SEQ ID NO: 304463

SEQ ID NO: 304579 - DNA, 430 bp, Glycine max
agctatgtgtaatcgattacactgatctggtaatcgattaccagcgattcgttctgaataaatcacaagatgtacctcttcagatggttttctgactttttcacatcgcatttaagtttttctataagtcataactcttctaaatgcgcctcttgaccacacatggagagtctataaaagcaaggctttgttttgcattttatatcaatccaatcaatcttatacaagccttgaatctctttgaacttcatcttctttgtgccaaaagctctacaaagttctctggttctctaaaccttgagaacttgcgctattcattcttttcatctcttcaccctctgtcacaaagaattcgacaaggactaaccgcctgaatcctttgtgcgcctctctttgccattctccaaacgaacgaacgactaactgcctg

SEQ ID NO: 304580 - DNA, 383 bp, Glycine max; identical to SEQ ID NO: 304465

SEQ ID NO: 304581 - DNA, 444 bp, Glycine max
agcttcatgatgatgaatcaaatatgattcaagatgttttgatgatgaccaagatgatgacaaaaagcccaaaagaattatttcaaggttgagtcaacaagttcaagatcaagattaaatcaagattaatttcaagtttcaagaaatgacatccagaagaatcaagattccagagaagatgacttcacaagggaagtattgaaaagaatttttcaaaaaaaccaaacatagcacagttttgttttacaagaaaagtttttctcaaaattttctaagttaccagagtttttactctttggtaattgattactagtttcctgtaatcgattaccagtggtaaagtttgatttcaaaagcttttaactgaatctgctatgttccaattgattcttaaatggtgcaattgattacaatatattggtaatcgattaccagtgtatctga

SEQ ID NO: 304582 - DNA, 390 bp, Glycine max; identical to SEQ ID NO: 304438
  unsure (1)..(390): unsure at all n locations

SEQ ID NO: 304583 - DNA, 410 bp, Glycine max
gttataaacctacaaatgctgacaagatgacgatctctttgcaactgaatgaaagaatcttacctcgtctgcatgggcgatgaccacaacgggagagggtccctacttgtcacatccacgagagctttgccaccacacggtggatgcataaagattaagttgctactatctgaccaaaatcccgatcacatcagtcgaattgactgcagatctgctccctgggctttgaattaaaacatcggcagatcatcgtccgacccaggatctctgcgtctaatccaatgtaatccagtcgtttggacactatagttgtgcctatgctctacggattgcttctcttgctgggcatacgctttctttactgatcgacatgactatctaatatccaacatcttattcgtgcattcccg

SEQ ID NO: 304584 - DNA, 386 bp, Glycine max; identical to SEQ ID NO: 304440

SEQ ID NO: 304585 - DNA, 337 bp, Glycine max
gagccaaatctgtctctcctaaaccttgacccaccgtgagaatgtccatccttaccctcgcaagcatataagaatacatgggaaattccctcttagagcaatagagacagaatctttcctatgaaagcctaacaaagacaagacggaaacttcctctatccatgagttggagaacgctgacagaatagataggaacttctctatctactaatgggagaacgtcaactaggaagaagacgaatgatagatagctcctgatcatggatctaacgagaaacagaacaaatgtgctcaaaggtctttggaccggacaatatctgaacgatactgaattgtc

SEQ ID NO: 304586 - DNA, 413 bp, Glycine max; identical to SEQ ID NO: 304442
  unsure (1)..(413): unsure at all n locations

SEQ ID NO: 304587 - DNA, 314 bp, Glycine max
agcttcgatttgctgcgatccgcgaggaacatgcatcaaccgcaccgatcagtggcaaaacagcacaatcgtgaagcataagaggagacaacagagagaaggacagagagtcaccgacctaggattgcatcttcgtcctcctcgccggtggtgacagcaacctcctcgagcttgacgatgggagcgacgtgtgctccggtgttctctgcgacgacgacggcgggtgcctccttctcttatcggagctcgggatcggcgctcgacatcttgtggaaggagagatggacacagagagatagagagagagatcccgt

SEQ ID NO: 304588 - DNA, 215 bp, Glycine max; identical to SEQ ID NO: 304444

SEQ ID NO: 304589 - DNA, 441 bp, Glycine max
  unsure (1)..(441): unsure at all n locations
agcttgaagtgagaaagtgtggaagagtcagtctccctacttttattcgttgaccacagagtggtacctggagatatgtcgcggnggtcaggagaccttgnggacgtcaggtggggtgctattgcccaaaaccaagcttgaccaatcctgacccaacccgggcatagtcagttagtgagaacctgtgacgtacctaaacaggcgagctcctggcagtcaaccgataaaagaacaaagaccacaaagcaagtaggcttgtgtggtggctggccagctatggatcttgagtgattatggcctctggtaatcgattaccaagggtgtgtaatcgattacaaggcttaaaaatgaagacaagaagttaagatggtctctggtaatcgattaccaagggtgtgtaatcgattaccaggcctaaaaatggngtcaggaagctgagat

SEQ ID NO: 304590 - DNA, 406 bp, Glycine max; identical to SEQ ID NO: 304446
  unsure (1)..(406): unsure at all n locations

SEQ ID NO: 304591 - DNA, 409 bp, Glycine max
agcttgcggactataccttctaccaaacacggccgtgtttctgtctcggcccggatctaaggcgggttgcagcaccggcttcgctctcctaactgtactggaggcggctgacgtggctttatcctctatagttttctggacttttaacatgacctccgagatggaagccatttgatcttttaaagccgatagatcggccttcatctgttcctgcacgccctcttcagtatccatttttctggatcgagtgttataggggtgccttggtgttttcttagctatgatgaaattcctaaagaaataaacaacggcgagtatgccaccaaaacatgaatatgcaaatggatgatcggagcacttggatccaccccaaggtttctagataacatgatgatgtcagaacttctca

SEQ ID NO: 304592 - DNA, 453 bp, Glycine max
agctctgatgagaaaacttccttgagaagcttctttgagaaaacttccttgagaagctagagcttaggctacacacacccctctaataactaagctcacatccttgagaagctgccttgagaagattcctaaagaagctagagcttatctacacacacatctgtaatagctaagctcacctccttgagatgagaagctagagcttaagtacacaccccctataatagctaagctcacccccatgccaaaatacatgaaaatacaaaaaaaagtccctactacaaagactactcaaaatgccctgaaatacaaggctaagaccctatattactataatggccaaaatacaagcctagaagaagatttacacagaagagtggacccaaccttggcccatgggctcatgagaaccctaaggccttctttagcagctctagcccaatcctcttggag

SEQ ID NO: 304593 - DNA, 365 bp, Glycine max; identical to SEQ ID NO: 304449

SEQ ID NO: 304594 - DNA, 460 bp, Glycine max
gcaagcttattggtgctagtactcactactgctgcaatatatttttcacagagaatgatacctctagataccatcataagagatatgactaccttgcgggttatcactaaatgcctagttagatctctcccttatacgtcccttaaatatgggcacggagcaaacacgctgcgggccatttttacactgccatgcataagtatcatatacccttttgcttatgtgcagagaatattatcatactgtgtacatctccgcattgcgtcttttgcatacgcatcgcatatgggacctgtcttgatcccttctgtatacaaaccaacggagggtccgtgtcgccttcttaaaaacgtacgctggggcactttgctacccctagacattgtgtctaagaaggtgacgaagtcctccggacccccgcattcctagatacatcttgtgtatatgcactccttcatgc

SEQ ID NO: 304595 - DNA, 396 bp, Glycine max; identical to SEQ ID NO: 304450

SEQ ID NO: 304596 - DNA, 308 bp, Glycine max
agcttgagcctaacgatgctcctagctgctgcttcccttatctctaacagtctccctctttatggctttggtgatgcccgacttcactatgacaccgagtgcatgaggagaggcttgatatggcattggactcttgactcttagacttattgtgaaaaaatctcactacttaatacatgacctattgattatcttcatcgtagatgggaagatctcaagtactatatataaccgtgctgagcatgctatgcaatgcacgctatacggactatgcaatatgcaatgtctacttcctcccctgttggcat

SEQ ID NO: 304597 - DNA, 400 bp, Glycine max; identical to SEQ ID NO: 304452
  unsure (1)..(400): unsure at all n locations

SEQ ID NO: 304598 - DNA, 386 bp, Glycine max; identical to SEQ ID NO: 304453

SEQ ID NO: 304599 - DNA, 561 bp, Glycine max
  unsure (1)..(561): unsure at all n locations
cctcctcgccatacccaagngatagatatcgtaagtgtactgactattcaaatnatactcacgccgccgcgaccacattgattgattgtaacactcgggacattaaggaactgtcagctgcagctcgaactactgctatgtctcgatatgggctgagccgagactaacgtcatcccactgcaatcctagcatctatcctgaacacgcagggtaactagttgatcgcaagaccatactatctttatagcgtgtcatacgacactttacatggaccatattcttgcctatggaggctcaaaatgaaacgctctacgtacgacgtacacatatgtacctctaacttcttaagtacaggtgacatatggggcatttcgatgatgtactcactccgacctcttacactggcgagtctaagagatgagaacctcctgataaacgcgcttgttacacgtctatctgaagtgacgacatggtcatcaatggccttaccaagctcgggaccttaaatgccggaaactaacaacagtatccagtcgtactatactctattgacattacccg

SEQ ID NO: 304600 - DNA, 392 bp, Glycine max; identical to SEQ ID NO: 304455
  unsure (1)..(392): unsure at all n locations

SEQ ID NO: 304601 - DNA, 447 bp, Glycine max
agcttgtttctaccgttccaattaaggaatctttatattcgctatgcctaatatctcttaagcacattaaaactgctacatctatgcccatatctattaaggtcttgatggctacttggacacaaccgatgtgtaaatacttgtatttacggctatgttcataaattgagttttttgaaagcaaatgaaacttttcccctatgtcttgtcctagaggaatattattttctactgtttttattatataattaaagttatgtttgtctttaattgtttcaagaacatacagtgtatcgtgagggatttctgggatgttccagtcatccatattttgatatatatctttgaatcggacttcctcatcgaagagattgtgttttgtggcgacctcatgggtctgggtttcatgctcattgagaaaattgttgctcttgggtgacatcattg

SEQ ID NO: 304602 - DNA, 377 bp, Glycine max; identical to SEQ ID NO: 304457
  unsure (1)..(377): unsure at all n locations

SEQ ID NO: 304603 - DNA, 389 bp, Glycine max; identical to SEQ ID NO: 304459

SEQ ID NO: 304604 - DNA, 432 bp, Glycine max
  unsure (1)..(432): unsure at all n locations
agctntcttgagaaaacttccttgagaagcttctttgagaaaacttccttgagaagctagagcttagctacacacacccctctcataactaagctcacctccttgagaaacttccttaagaagattcctaaagaagctagagcttagctacacatacctctctaatagctaagctcacctccttgagatgagaagctagagcttagctacacacccnctataatagctaagctcacccctatgacaaaaaacatgaaaataaaaaaaaaagtccttattacaaagacaactcaaaatgccccgaaatacaaggctaaaaccctatactactagaatggccaaaatacaagggccagacgaaggaaatacctattctaatatttacaaagataagcgggctcatacttagcccatgggctcgaaatctaccct

SEQ ID NO: 304605 - DNA, 384 bp, Glycine max; identical to SEQ ID NO: 304461

SEQ ID NO: 304606 - DNA, 382 bp, Glycine max
  unsure (1)..(382): unsure at all n locations
agcttctncttcttttccctataaataggggaatgacggaagaacaaaaaggttcaaccctcctggtatcagagaatcacttaaaattagcgagaaaaattgtttccgtgaagaaaatccaagccgaggcgcttccataacgcttccgagacattttcgtgggtgatttcgcgaggatttatcgncgttcttcatcggtcttcgttcgttcttcgacgttcttctgtcttcaaccggtaagttcccgaaatcgaacttttcaattcattctatgtacccttacgagtcctcatttgtctcacgtgttcttattgttatttcatttactttccgtacccccttttgacgtgctttaatcatttattcaagtcattttctcgcc

SEQ ID NO: 304607 - DNA, 396 bp, Glycine max; identical to SEQ ID NO: 304463

SEQ ID NO: 304608 - DNA, 296 bp, Glycine max
  unsure (1)..(296): unsure at all n locations
taataaanaaagagtgatatttangtaataatttggggtttatgataatgatttgggagggtatttgtaaagggaataaaaaaatgagaattatgaagatgagggtaagagagaaaagtaattatggtaggtatggtgttaatagaaattgagggattgataagaatggaaggaatttggtataggagtgagaaataagagaagttatgggaattgatgtgtgataaaggtattaagaaaaaaaggaaaagaagtgggttaaatatgaggggtaaatattgaataaaaaaaaagat

SEQ ID NO: 304609 - DNA, 383 bp, Glycine max; identical to SEQ ID NO: 304465

SEQ ID NO: 304610 - DNA, 383 bp, Glycine max
agcttgcttgtggtgcttctatggaggctggatctttgagcttcaatgaggtccttcaatggtgattttccaccatggagatgcagtggaagacaaaggagaagaggtgagaggaggcgccatccactagggaataaaccatagaagaaggagcttcaccaccaagatgagccttggataagaagcttggagaggatgcttcaatggaggaaaagaaagagggagagaaagagagaggggggagcacaaaattgaaggaagaaaaagggagagaagttgaactttgagttgtgtctcacaagactctcattcatcaaagttacaacaagtgttacacatgcttctatttatagactaggtagcttccttgagaagctttcttg

SEQ ID NO: 304611 - DNA, 404 bp, Glycine max
  unsure (1)..(404): unsure at all n locations
agcttccaagcttattgtgatgatgccaaagactcaagtcaagaatcatgattcaagcaagtttcaagaatcaaagagtcattcaatcaagaatcaagattcaagtgaagaatcaagagaagactcaagatatgcaagaacctcaagaaaagcatcaagataagtataaaaagaattttcaaagaaaagattgaatagcacaatttgtccgaaataatttttcaaagaaaaatcttttaccagagtttttatggtaatcgattaccagatgcctaaaaacgttgtataactattttacaaagtagtaatcaattaccatgggcatgtaatcgattaccaatgttgttgaactttgaatntaagatttcaagagtcacaacttgtgataaaatattttcaaactt

SEQ ID NO: 304612 - DNA, 262 bp, Glycine max
agcttcggttgttctatttcgagcatctttatatgtgatgttcctgtatcggacctccgtgtgataacttatgaccattataatttctcgagagcttccgctgttcaatttcgagcgtctcgatatattatgcgcccaaatcggacatctcggggaagggttatgaccatatcaatatcacgaaagctttggttggcaatttctagcatctcaattgtgatgttcctgtatcggaccttcgtgtcataacctatgaccattt

SEQ ID NO: 304613 - DNA, 411 bp, Glycine max
  unsure (1)..(411): unsure at all n locations
agcttgtaggattatggngtacccatcatatgtggtactaggtggcggtcgggcgatggtgcacaacaagttttccacatccacaatgcgcgcataaacccaccatcccctgttgcccacctccaactgagctcacgtactcccacgtagcccatatcctcttttctctcaacaccgggtccccatcaatcctcccaagccttcccaacatcaaagcaaaacaacattcaaacagcacaagctatcacagccaagcaaaacagagcaaaagcagaaaactctgccaaaacaccaaccagatcacagcttttctcacttagagaccccagtaacaattccttcgatccaaattcgtaaccgttggatcgactccaaaattttactggaagtctatagtgcataagcctacat

SEQ ID NO: 304614 - DNA, 374 bp, Glycine max
  unsure (1)..(374): unsure at all n locations
agctttgcggatttgtacttcgccagtgtaatgatcaaagtgggtctgaaaagaggcaaatttggtcatcctgctttgataaaaactggggcaaatgaagaggatgagaatgagggagaaacccatgttgtggttgccattcctatatggccaagtttcccaccaacccaacaatgtcattactcaaccaataacaacccatctccttacccaccacccaattatccataaaggccatccctaaatcaaaccacaaaacccacctaccaatgctaaacaccacctttagcataaaccanaacacccgccaatatatgagttttgcagcgaanaaaaccttgangattcacccaaaatccggtgtctatgctgac

SEQ ID NO: 304615 - DNA, 255 bp, Glycine max
agcttggcatatatatatatatatatatatatatatatatatatatatatttatatatattataacaaagagatcttcatctatgaaactatgttacgtgacaatctcatattttttacttttcaattaaacgcgatccattcaactatttattctaattatcttatttttcttcattaaacgcacccgcgccgaatatttagtttaattgctttattcttctatgttaaaataaaaaaatacataataattatt

SEQ ID NO: 304616 - DNA, 402 bp, Glycine max
  unsure (1)..(402): unsure at all n locations
agcnttgatgatatggtcttcaccgactaaaggatcaatgtgggtctaaataaaggcaaatttagtcatcctacttagacgaatgagaaaactggggcaaaagaagagggtgaggatgaaggagaagcccgtgctgtgactgccattccaatacagccaagtttcccaccaacccaacaatgtcattactcagccaataacaaaccttctccttacccaccgcccagttatccacgaaggccatccctaaaatcaaccacaaagcctacctaccgcacttccaatgacaaacaccacctttagtgtaaaccaaaacaccaaccaagaaatgaattttgcagcgagaaagccttagaattcaccccaattccagtgtcctatgctaacttggctccatatcta

SEQ ID NO: 304617 - DNA, 391 bp, Glycine max
  unsure (1)..(391): unsure at all n locations
agctntggagaaccaagccaatcagaatgctagacgaaatatagatgggaatagaggtaacaatggcggtaatgacggaccgaggcagaaccgggttgagggagtaaagctcaatgttcctcccttcaaaggtagaagtgatccagatgcctacctggactgggaaatgaagactgagcacgtatttgcctgcaatgactacactgatgcgcagaaagtcaagctagcagcagctgaattctccgactatgcccttgtttggtggcataaataccaaagagaaatgttgagagaggaacggcgagaggtagatacatggactgagatgaaaagggtgatgagaaaaaggtatgtgcccactagctataacaaaaccatgcgacagaaactt

SEQ ID NO: 304618 - DNA, 328 bp, Glycine max
  unsure (1)..(328): unsure at all n locations
gagcccgagtagtcgaagatatgnttaagtccatagccatcanagtctgaaaagagtatgatgaactaagggacgtctatatggccaccgttgaagccttggaacgagaaaccaagaaggcccgaaaggaataacacgtgccagcaaagttttgaggggctttatagggcagcaatagtaagctcaagctccgaaaaggtgaaaggaatcatcacgggtcaaaggcatgatcttgaaggatgagctaaaggcttaccttaggtcgaaaagaaatttgtcccaacaagtaagcgagactgaagggaatatgtgggccgtcatcgatgag

SEQ ID NO: 304619 - DNA, 410 bp, Glycine max
tcttaagcacctgcggcatgcaactataccttatcggaattggaaaagatttaatgtaagtcaagagcatgatagtgtgtcgataccattaactggtcacaggttcttaagcaggccgagggcatcaatattgtatttggaaagacccaagagaaggaaaaaactaaaacttccatatggaagaagaggtcgatattgtttgatcttccatactggtatgatctagatgtcagacattgtattgatgttatgcatgttgagaaaaatgtgtgtgatagtgtcattagcacacttggtaacattcaaagaaagacaaaggatggtttgaatactcaccaggatctagtttagataggtatacgagacccagtacattcaaggtctgatggtaacaaaatatacttgccttc

SEQ ID NO: 304620 - DNA, 425 bp, Glycine max
  unsure (1)..(425): unsure at all n locations
agcttgatgtgagaaagcgtggaagagttagtcttcctactttngtttgttgaccacaaagcggtacctggagatatgtcgcgggggtcgtcaggtggggtgctattgcccaaaaccaagcttgaccaatcccgacccaacccgggcatagtcagtcagtgagaacctgtgacgtacctaaacaggcgagctcctggcagtcaaccaataaaagaacaaagaccacaaagcaaggaggcttgtgtggcggctggccagctatggatcttgagtggtatctagaaattggcctctggtaatcgattaccaagggtgtgtaatcgattacaagacttaaaaatggagacaggaagttaagatggcctctggtaatcgattaccaaggggtgtaatcaattacaaggcttagaaatggngacaggatg

SEQ ID NO: 304621 - DNA, 394 bp, Glycine max
agcttcaagaaaaatggcctcaacaaattccttatttccagaaggaaattctatcaatagacctccaatctttaatggagagggttaccactactggaaaacccgaatgcaaatttttattgaggcaatagacttaagtatttgggaagccatagaaatagggccttatatacccaccacagtggaaagaattacaatagatggtagcacatcaagtgaaagcataacaatagaaaaacctagagatagatggtcagaagaggatagaagacgagtacaatacaatttaaaagccaaaaacataataacatcagccctaggtatggatgaatatttcagggtttcaaattgtaagagtgctaaggaaatgtgggacactctacattaacacatg

SEQ ID NO: 304622 - DNA, 351 bp, Glycine max
  unsure (1)..(351): unsure at all n locations
agcttaatcttctttatgaatcttcttaatgaagcttctcaaggaggtgagcttagttatgagaggggtgtgtgtatctaagctctagcttctcaaggaagttttctcaaagaagcttctcaaggaagttttctcaagaaagcttctcaaggaagctacctagtctataaatagaagcatgtgtaacacttgttgtaactttgatgaatgaaagtcttgtgagacacaactcaaagntcaacttctctccctttttcttccttcaatttcgngctcccncctctctttctctccctttttcttttcctccattgaagcatcctctccaagcttcttatcccaagctcatct

SEQ ID NO: 304623 - DNA, 313 bp, Glycine max
  unsure (1)..(313): unsure at all n locations
agctttataagtgcgggtctgggagactattgtcaagtgttcgcgatatgtgaagatgatgttccaagtacttcggatttggtccgaccatgccctcctgatttccagctgggaaattggcgagtggaggaacgccccggcatttacgcaacaagcataatgtaaaccttgacggttttaaaagctctatagttgggcctaggctttagagttttcgttttgttaaagctntgtgtcttttgtttttgaatttataatacaaggatctttctttatctgttcctgggctctacccattctcattcatttgcat

SEQ ID NO: 304624 - DNA, 394 bp, Glycine max
  unsure (1)..(394): unsure at all n locations
agcttgtcccagcgtttatgcgagacatataccaacatgttagctatcatcgccaagtacgaagaagagttgggtctagccacggcccacgagcatagaatcgcggacgagtatgcccaagtatatgcggaaaaagaggctagaggaagggtgatcgactctttacaccaagaggcaaccacgtggatggatcggtttgctcttaccttgaacgggagtcaagaacttccccgattgttagccaaggccaaggcgatggcagacacctactccacccncgaagagattcatgggcttctcggctattgtcagcatatgatagacttaatggcccgcataattagaaatcgttaggaaacttgtatggtctcttagaccttgactagatatgact

SEQ ID NO: 304625 - DNA, 419 bp, Glycine max
  unsure (1)..(419): unsure at all n locations
nagctctaaagcacagcaacacagaatctatgtgtccaacacccctccattcaattgggttttctatgtttgaaaagtgaaatttaaaatgaggtaaatttgaagcaaactctcacctcacaccagtccataacatccatttagacttgttcaaactggatttacacctaaaatctcaccgaatcaaaatttgactcttcaacacccaaatttgccctagaaatggctctttgttcactttggtcatttatttttctctctaacacagtccaagctttctcataagtcctaaatgacatttcaagctagtattaactcactttaacctccatttaccacagaattcagacttagccttccaaccctcagagtctcactctgtttccactcataacatcacattctcactttctaaccct

SEQ ID NO: 304626 - DNA, 336 bp, Glycine max
  unsure (1)..(336): unsure at all n locations
agcttgactntgagagttgattttagccttactttcactttagttattagtcaattcaattaagaaagagaaatccaaaagtgaaacatccgattgattttttcgctttattttactaaaagatattttttaattatattattattttatctctttttagtttccaacgtggttacggtacgacggaacggtcggatttcattttagcataaattaatggatattacaaatcaaacgatcggtggaaatttattttattttttgattaggagagaaaatgacttaagtaaatgactgaagcacgtcaaaaggggtacgaaaagtaaatganacgag

SEQ ID NO: 304627 - DNA, 399 bp, Glycine max
agcttttcgattcattctatgtacccgtagtggtccacattgtgtttcgtgcatttttattctcgttttgtttactttttataccccctgttgacgtgcttaagccattttacttaagtcatttctcgcttaacttaaaaataaaataaatttccaccgaacgtttgaattgtattatccattaacttcgggtaaaataaattccgaccgttcggtcgtgccgtaaccacgttggaaatcaaaaagaggtaaaaaataatataataatcaaaaagacatcttttagtaaaataaagcggaaaatcaatcggacgttttctctttgggatttctcattcttaatcgaatggattaataactaaagtgaaactaaggctaaaatcaactcgcctagtcaag

SEQ ID NO: 304628 - DNA, 356 bp, Glycine max
  unsure (1)..(356): unsure at all n locations
agctntgagccanaatcctgacacaccatataccttgacccagggtgagaatgtcaattcttaccctcggaagcaaaaaaaaaggggagagggaaaatttccaatcaaagaggaagcaaaaaaggagagaaggaaaatttccaatcaaaggaaaaaaagagaggaaagggaattcccaatcaaagagtgggagaaagcaaaaagaaaagaaagaaaattcccaatcaaagaatgggagaaagaaaaaagagaagaagaaagggaagaaagttcccgatcaaaaaaaaaaataatatgcagaaaggtctttggaccggacaatatctgaacaatacagaattgtcaccaaatgaata

SEQ ID NO: 304629 - DNA, 353 bp, Glycine max
tcctctcagtcacctgcggcatgcaagcttgtaaaaagggaagcaagttaaaaactcttttcaaagtaaaaacgttgtttctacttcaaaaccctttgaactacttcacatagacttatttggtgcctctaaaactatgagtttgggtgggaattactatggcttagttatagtagatgattactcaagattcacatggactttgtttttgaaaaccaaagatgaagcttttgatggttgttgcacacttgccaaggtcattcaaaatgaaaaaaggtcttaacattgtttcacttagaagttatcatggaggtgaatttcaaatgagtctcttgaaatgtttgtgagaaaat

SEQ ID NO: 304630 - DNA, 409 bp, Glycine max
agcttataagaacatatttgcctcaatcatttccaaatatgcatgtgaattatgaagcatcaacaagaatcaagccaaggctattgtgcaagcaatcaatggggcaaaacacaccaaatgattatgatgatggatggctcaaattctcacaaaggtaaactcatcactttcaaattgagctttcaaaactatcatgtcaggtagaggaaaaacaaggatttcaaatcacaaaatgtcaagaggctttttttttcaaaacaattacccatttcttgaacatatcctataattcaaagaaaaacatgcaaagtcgtacatgcacacagaattgacccaaaatattaaactagaaacccaatgaaactaacaacattaacaaattaacacaactaacaaattaacaaaaccg

SEQ ID NO: 304631 - DNA, 385 bp, Glycine max
  unsure (1)..(385): unsure at all n locations
agcttnttggagtagaaacatggttccttctcattttatttcaaaaagttgtatctagtcaaggtctgagagaccatacaagtttcctagcgatttctaattatgtgggccattaagtctatcatacgctgacaatagctaagaagcccatgaatttctttgggggcggagtaggtgtccgccatcgccttggcctttggctaacaatcgggaagttcttgactcccgttcaaggtaagagcanaccgattcatccacatggttgcctcttggtgtaaagagtcgatcacccttcctctagcctctttttccgcgtatatntgggcatactcgtccgcgaccctatgctcgtgggccgtggctagacctaactcttcttggtact

SEQ ID NO: 304632 - DNA, 413 bp, Glycine max
  unsure (1)..(413): unsure at all n locations
agcttganggattggtctttgccagtgaaaggatcgatgtgggtccgaaaagaggcaaatttgatcatcctactaggacgactgagaaaactggggcaaatgaagagggtgagaaagagggagaaacccatgctgtgactgccattcctatacggccaagtttcccaccaacccaacaatgtcattactcagccaataacaaacctcctccttacccaccaaccagttatccataaaggccatccctaaatcaaccacaaagtctgtctaccgcactttcaatgacgaacaccacctttagcaaaaccaaaaacaccaaccaaaaatgaattttgcagcgagaaagcctgtagaattcaccccaattccagtgtcctatgctgacttntctccatatctacttgataattcaa

SEQ ID NO: 304633 - DNA, 394 bp, Glycine max
  unsure (1)..(394): unsure at all n locations
agcttgaaggcaaattggatgcattggttaacttggtaacccagctggccttgaaccaaaaatttgtacctgttgcaagggtctgtggtttgtgctcctctgctgaccaccatacagacctttgcccttccatgcagcaacctggagcaattgagcagcccgaagcttatgctgctaatatttacaatagacctcctcaacctcagcagcaagatcaaccacagcaaaataattatgacctctccagcaacagatacaaccctggatggaggaatcaccctaatctcanatggtctagccctcagcaacaacaacagcagcctgctccttccttcaaaatgttgctggcccaagcagaccatacattcctccaccaatccaacaacagcaacag

SEQ ID NO: 304634 - DNA, 339 bp, Glycine max
  unsure (1)..(339): unsure at all n locations
agctntgagccaattcaaacgacaatatctttntactccgatgtctgattgagtcccttcatatatcgagacgctcgaaattgaatgttgaagctctgagccaattcaaacgacaataactttttactcggatgtctgattgagtcccgtaatatatcgagacgctctaaattgaatgttgaacctctgagctaattcaaacgacactaactttatactcggatgtctgattgagtgccgtaacatatcgagacgctcgaaattgaatgttgaacctctaagccaattaaaacgacaataaacgtttactcggatgtctgattgagtcccgtcatatat

SEQ ID NO: 304635 - DNA, 387 bp, Glycine max
agcttatcacctttatcggcaattgaaaaaagattttaatgtaagtcaagagcatgatagtgtgtcgataccattaactggtcacaggttcttaagcaggccgagggcatcaatattgtatttggaaagacccaagagaaggaaaaaactaaaacttccatatggaagaagaggtcgatattgtttgatcttccatactggtatgatctagatgtcagacattgtattgatgttatgcatgttgagaaaaatgtgtgtgatagtgtcattagcacactggttaacattcaaagaaagacaaaggatggtttgaatactcaccaggatctagtttagataggtatacgagaccagttacatccaaggtctgatggtaacaaaatatac

SEQ ID NO: 304636 - DNA, 441 bp, Glycine max
agtcacctgcggcatgcaagcttaccatggttcatccatttgcttaatggtctgcaacataagctagagccttgtttcggtgcctaatcccagcttccaaagttgctgataactgttaaatatgagttgttttttattataaaaatataatgaaaatatctttaaaatatttatttaacagttattttttacttaaatattaaaaattgatatttttcttatttatggcttgtagatatgaaaaggagggataaaatccaaaaatatgcagaaaatatcaaaaatatgaataaggaagatttttgccatcaggtccaagtccactccaacaactataaaaaaggaatcaagccaagcagaaaagacacaccgagtctcagagcactctaatacacacctaaagtctgagaactctcccttagaaatctttcttctctctca

SEQ ID NO: 304637 - DNA, 375 bp, Glycine max
gggatcctcttagtcacctgctgcatgcaagctataagaaattttgcaacatcgttttggatatttaacaagaacattctatttcttgacattggtaccttggtaattatattatttctcccatctctgatggaaagactggaatctttcatgtgaatatcatagccttttttgaggaattgtcccaaactcaaaatattgttcttcatatttgggacgtagtagacatttgatatgaattcatgtcttgcatccttcaaatggattatgatcttacctttttccttttataggaatattggaattattaccaaattaagcattgccacttactgactcatcaagatccacgaaacatgcttcttttccacacat

SEQ ID NO: 304638 - DNA, 416 bp, Glycine max
  unsure (1)..(416): unsure at all n locations
agcttatattttactaaacttcgntgtgtatttaaatatganaagaggattntgctatccctaaaggaaagaaaaaaaaaatgaaaatacggtccttgagtgttgtcagtgaatgactatgagtgcacatgtgagagaaaattggtagtgtaataaaaaaattcacaaacaaccttaaacagtaaaacaaatcatccaacaccgagtgataaaatataaaggtataaagtatattattttattacttaatatatttaataaaataaaataataaaaatatgtttttatcaagtgtggtgtatcactgttcttctgtctttttgtgggaataactctgttattaatataccttcttttattgaaattaaaagaacgaaaaataaagggaagaacaacgactaccaacttttttttac

SEQ ID NO: 304639 - DNA, 390 bp, Glycine max
  unsure (1)..(390): unsure at all n locations
agcttgtagggttaaagtctcacgattgtcacgtgttgatgcaacaatggttagtcgtggctatacgagacatcttgccaaacaaagtcaagttagccataactcgcctgtgctttttcttccatgccatatgtagcaaagtcgttgatcctgtcaagtttgatgagttggaaaatgagaccgcaattatactatgccagttggagatgtattttccccctgctttctttgacatcatgattcacttgattgtgcatctggtcagagaaatcaaatgttgtggtcctggttatttgcggtggatgtacccggttgagcgatacatgaagatcttaanagggtatacaaagaatctatatcatccagaagcatctattgttgagaggtaca

SEQ ID NO: 304640 - DNA, 277 bp, Glycine max
  unsure (1)..(277): unsure at all n locations
ttcctttgatagcccttttgagcctttgtctccctttccttgttttgaagctcactacaagccttaagtgaaaaaccatgatattaccatatccttaaggaattttggagctttggaattgtcttgggaataagtgtgggggcgttttgtttcattggacaacttgttttgttggctatgcttcatgatgtattttgcgccatacttgatgtacattgtatattggntaaatgttggacatgctgaatgaaatgttgtttctcaaacgctaaagagt

SEQ ID NO: 304641 - DNA, 411 bp, Glycine max
  unsure (1)..(411): unsure at all n locations
tctttgagaagctttctaacaggcttctttgagaagttagatccttatctatccacacccctctattaactaaattaacttccttaaaaataattacggatgaaaataatgcaacaaataatcaaacatcaaacataattactaataatatatagatatatatatcaaggtgttacacccctcgccgcggatctctcggaccactcctccctctccattctcgccatctncaatgcctacctcgccaccgatgaccactgaaaaaagatgatggaattcataaaccaagaaaggggtgaatcggttctaaattaattaaacttaaaaaatagttaaaaattttctttccagaatctatcaanactctgataaccaatataatgaataccttaagaattttttgttaagtct

SEQ ID NO: 304642 - DNA, 149 bp, Glycine max
gaaattaaatagtcatactattcacaccgatgttcgacttcggcgcataatatgtcgagaggatcgaaattgaacaacggaagctcttgagaaattcaactggtattaccttttcacaccgatgttcgattcaggcgaattacatatcc

SEQ ID NO: 304643 - DNA, 334 bp, Glycine max
  unsure (1)..(334): unsure at all n locations
ttacagtcacctgacgcatgcaagcttgtttttataatagagagattgaacacgacggaactacagtgtgaagtanctgagcctgatctcacacagggtgacacaaaatcttccgcgtcacggaacatctgaagcccttgatgatgaacactctgaaagctagatgtggcccttgaaatcattgcttctctacattatcttcttccaataactggtttntaaacaatggctctgatgagtttcttgattgaaagaaagatactacatattgacagcacatatatatatatatatatatatatgctcgactctgctccttaatatgaacttgcac

SEQ ID NO: 304644 - DNA, 340 bp, Glycine max
  unsure (1)..(340): unsure at all n locations
agcttgccttatagagggtcaggaacgacaacgttgtcgaaggaactactttcgctcctgagtatgacagtcaccgctttacgagcgctgtacaccagcagcgcttctaggccatcaagggatggtcgtttctccaggagcgacgcgtccagctcacggacgacgagtatactgatttccacgaggaaatatggcgtccgcggtggacatcactggttactcccatggncaagttcgatccacaaatagtccttgagtctatgcccatgcttggccaacagaggaaggcgtgcgtgacatgagatcctgtgtaacgggtcagtggatcccgtttgatgcc

SEQ ID NO: 304645 - DNA, 375 bp, Glycine max
  unsure (1)..(375): unsure at all n locations
tcctgagtatgacagtcaccgctttatgagcgctgtacaccagcagcgctttgaggccatcaagggatggtcgtttctccaggagcgacgcgttcagctcagggacgacgagtatactgatttccacgaggaaatanggcgtctgcggtggacatcactggttactcccatggccaagttcaatccananatagtccttgagttttatgccaatgcttggccaacagaggagggcgtgcgtgacatgagatcctgcgtaaggggtcagtggatcccgtttgatgcccacgctatcagccagctcctgggatatccgctggtgttggaagagggccacgaatgcgagtatggccagaggaggaaccggtctgatgg

SEQ ID NO: 304646 - DNA, 356 bp, Glycine max
  unsure (1)..(356): unsure at all n locations
gatgatttctccagatttacctgcgctaactttatcagagagacatcagacaccttcgaagtattcaaagagctgactctaacacttcacagagaaaaagactgtgtcatcaccagaattatgagtgaccatggcagagagttcgaacaccagacgttcacagaattctgcacatctgaaggcatcacttatgaggtctttgcagncattacaccaccacacaatggcctagctgacaggaaaaacacgactttgcacgaagctgctagggcnctgcttcattgcacagaactttcctatcatctttgcgctgaaggcactgacacagcctgctatattcaccacagagtcacact

SEQ ID NO: 304647 - DNA, 280 bp, Glycine max
ctggaactacttcacatggactcgatggcgcccatgcaagttgaaagccttgcaggaaagacgcatgcctatgttgtcgtggatgatttctccagatttacctgcgtcaactctatcagagagaaatcacacacctctgaagtatccaaagagttgagtctaacacttcaaagagaaaaagactgtgtcatcaagagaattacgagtgaccatggcagagagcttgaaaacagcaagcttacagaactctcgacatctgaaggcatcactcatgagttct

SEQ ID NO: 304648 - DNA, 369 bp, Glycine max
  unsure (1)..(369): unsure at all n locations
aactgagaatgggggtaattttggagcacactctcatcttaaacaaagtctataacattaatctaaactcgctcaaactagttttatgacgaaaactctaccgaatcaaaatttgactcctcaacacccacattaccctagaaaagggctcttgccttcactttggtcactcattttcctcctttgcacagcccaagctnttccacagtcctaaatgacatttcaaactacgatttactcactttaacctccaattaccactaaatccagatgtagctgttcaaattctcagagcatcacactgttccactcatatcactacattctcaccttttaaccctacgttaactctacccttcatctctatca

SEQ ID NO: 304649 - DNA, 452 bp, Glycine max
  unsure (1)..(452): unsure at all n locations
tttgcatgctancttttctatgaagctgcataggctataaatagaagcatgtgtaacacttgctgtaactctgatcatttgagaattacacttcaaagttcagacctcatttgaggcacaaaatttcgggctccttctctccctttccctccacttatcttctcataccttcaagctcttatccatggcttcctatggtggtgagcttcttcttgacttatcttctccttgaagtggcatctccaatcatctttcttccttcttccttctgctaccatntatcttcaagaagcaaagggcttcattgacaaagaagatccaaggcctacaagctctacatggagttacatcaatgtctacctggtcttacaatgaaaatccctacggaactcataatgtacaatcatatctttctggcaaagggagacatgaatctcacgagctctgtgata

SEQ ID NO: 304650 - DNA, 422 bp, Glycine max
  unsure (1)..(422): unsure at all n locations
tcttacagtcgactgcagcatgcaagcttcttttgtaactcataggctacaaatagaaggatgtgtcacactctgctgaactttgatcatctgagaattacacttcaaagcncagacctcatttgaggcacaaaatttcgggcttcttctcttcctttccctccacttatcttctcataccttcaagctcttatccatggcttcctatggtggtgagcttcttcttgacttatcttctccttgaagtggcatctccaatcatctctctctctctttccttctgctaccatttatcttcaagaagcacacggcttcattgacaaagaagatccaaggcctacaagctctacatggagttacatcaatgtctacctggtcttacaatgaaaatccctacggaacttataatgtacaatcatatc

SEQ ID NO: 304651 - DNA, 422 bp, Glycine max
  unsure (1)..(422): unsure at all n locations
agcatgtgtaacacttgctgtaactctgatcacttgagaattacacttcanagttcagacctcatttgaggcacaaaatttcgggctccttctcttcctttccctccacttatcttctcataccttcaagctcttatccatggcttcctatggtggtgagcttcttcttgacttatcttctccttgaagtggcatctccaatcatctttcnttcttcttccttctgctaccatttatcttcaagaagcaaagggctctattgacaaagaagatccaaggcctacaagctctacatggagttacatcaatgtctacctggtccttacatganaatcctacggaacttatactgacaatcatatctcctcgccaacggagacatgactccacgagtttgtgatatcttgtgacgaaaagtcaat

SEQ ID NO: 304652 - DNA, 326 bp, Glycine max
  unsure (1)..(326): unsure at all n locations
actcaaaaatcagtgccaactctcgtcactcccgcattntatctctagcaggcattgtctgttggtctcagcctttgtcacgggaagccggaaggcccatatcacctctttaactgtacacatggggcactgcgcccccaaatgcgcaagcaagaagagataatcttctcggctctcatcttcataaatgcattcatatcatgcatcgcataagcctctcttcgcggcatcataatgaacatatnattcctgcatttgcctcgtatatattccagcctcacattntgcatgagtcattgcgcatcatgcatatgcgctcaacatac

SEQ ID NO: 304653 - DNA, 428 bp, Glycine max
  unsure (1)..(428): unsure at all n locations
agcttgatattatgcttatactaacatcgncttctgcgaccttgctcaatcacggctgacaagatcgttgacacgtggagatntatgtcatcttccgcgctcacaagatctgtcatactgactttttagtcacgctgacggccggaaatacccgagtggttatccgtataaactttttggtgtctataagacgaatagcctgatagcacgcagagactaacgtcgacttctgcgctcttcgtcaatcgcggccgacaagcccgttgacacgtggagatttaccttatcttccgcgctcacaagatctgtcatactgactcttgagtcacgctgacgggcagaaatacccgagtggttattcgtataaactctntgctgtctgtaagatgataagcctgatagcacgtatagactaacgttgtcttttg

SEQ ID NO: 304654 - DNA, 340 bp, Glycine max
  unsure (1)..(340): unsure at all n locations
gactaacatcgtcttctgcgaccttcctcaatcacgggtgacaagatcgttgacacgtggagatttatgtcatcttccgcgctccaaagatctgtcatactgactntctagtcacgctgacgggcggaaatacccgagtggctatccgtataaactttctggtgtctataagaccaanagcctgatagcacgcaaagactaacgtcgacctttgcgcccttcgtcaatcgcggccgacaagcccgttgacacgtggagatttaccttatcttccgcgctcacaagatctgtcatactgactcttgagtcacgctgaccggcaaaaatacccgagtggcta

SEQ ID NO: 304655 - DNA, 418 bp, Glycine max
  unsure (1)..(418): unsure at all n locations
gatcgttgacacgtggagatatatgtcatcttccgcgctcacaagatctgtcatactgactttntagtcacgctgacggccggaaatacccgagtggttatccgtataaactctctggtgtctataagacgaaaagcctgatagcacgcaaagactaacgtcgacttctgcgcccttcgtcaatcgcggccgacaagcccgttgacacgtggagatttaccttatcttccgcgctcacaagatctgtcatactgactcttgagtcacgctgacgggcagaaatacccgagtggttatccgtataaacttcttgctgtctgtaagacgaacagcctgatagcacgtatagactaacgctgtctcttggggccttcatcaatagcggccgacaagcccgttgacacgcagagatctacgt

SEQ ID NO: 304656 - DNA, 340 bp, Glycine max
  unsure (1)..(340): unsure at all n locations
atgccagcttgtctattcgttatgcgagacagagacctttatgttagctatcatcgtccagtacgaagaagagttaggtctagccacggcccacgagcatagaatcgcggatgagtacgctcaagtatatgcggaaaaagaagctagaggaagggtgatcgactctttacaccaacacgcaaccatgtggatggatcggctcgctcttaccttgaacgggagtcaagaactttcccgattgttagctaaggccaacgcgatggagacacctactccgcccncgaagagattcatgggcttctcggctatcgtcagcatatgatagacttaatggcccaca

SEQ ID NO: 304657 - DNA, 425 bp, Glycine max
  unsure (1)..(425): unsure at all n locations
gtacgaagaagagttaggtctagccacggcccacgagcatagaatcgcggatgagtacgctcaagtatatgcggaaaaagaagctagaggaagggtgatcgactctttacaccaagaggcaaccatgtggatggatcggtttgctcttaccttgaacgggagtcaagaacttccccgattgttagctaaggccaaggcgatggcagacacctactccgcccncgaagagattcatgggcttctcggctattgtcagcatatgatagacttaatggcccacataattagaaatcgntaggaaacttgtatggtctcttagaccttgactagatatgacttcccttttgaaataaaatgagttggtcccatgtttctactccanaaaaaaaaaaacttgtgcaatcaaatactctacatctatctta

SEQ ID NO: 304658 - DNA, 392 bp, Glycine max
acatgttagctatcatcgccaagtacgaagaagagttaggtctagccacggcccacgagcatagaatcgcggatgagtacgctcaagtatatgcggaaaaagaagctagaggaagggtgatcgactctttacaccaagaggcaaccatgtggatggatcggtttgctcttaccttgaacgggagtcaagaacttccccgattgttagctaatgccaaggcgatggcagacacctactccgcccccgaagagattcatgggcttctcggctattgcagcatatgatagacttaatggcccacataattagaaatcgtacgaaacttgatggtctcttagacttgacagatatgacttctttttgaataaatgaattgtccatgttttctcaaa

SEQ ID NO: 304659 - DNA, 333 bp, Glycine max
  unsure (1)..(333): unsure at all n locations
gttgtctgacgcctgacatgtcttttctgatggcagtgcgcctagatgtacggaagaatttctccaagaacaccctcttaaggtcatcccagcggagaatagacctaggagcaacgtagtatagccaatcttttgccactccctccagagaatgacgaacagcctttataaagatatgatcttcttggacatcacggggcttcatggtgaaacaaacaatatgngaactcttaagatgcttatacgatcttcacctacaagatcatgaaacttgggcaccaaatgtattagttcacgcttgacaacatatcggacaccctcattacgatattg

SEQ ID NO: 304660 - DNA, 367 bp, Glycine max
  unsure (1)..(367): unsure at all n locations
ctgatggcagtggtcctaaatgtacggaagaatttctccaagaacaccctcttaaggtcatcccagcggaaaatagacctatgagcaaggtagtatagccaatcctttgccactccctccagagaatgaggaaaagcctttagaaagatatgatcttcttggacatcagggggcttcatggtgaaacaaacaatatggaactccttaagatgcttataaggatcttcacctacaagatcatganacttgggcagcaaatgtattacgccagtcttgagaacatatggaacacccttcataggatatcgaatgcacaagctttcataagtgaaatcaggtgcagccatctccctaagagtcctctcac

SEQ ID NO: 304661 - DNA, 366 bp, Glycine max
  unsure (1)..(366): unsure at all n locations
tgaaacttcctgcttttattgttgaccacagagtggtacctggagatatgtcgcgggggtcatgagaccttgggaacgtcatgtggggtgctattgcccaaaaccaagcttgaccaatcccgacccaacccgggcatagtctgtcagtgagaacctgtgatgtacctaancaggcgagctcctggcagtcaacagataaaacgaacaaagaccacaaagcaatgaggcttgtggtggctggccagctgtgaaacttgattgatatgtgagatatggtctctggtaatcgattaccaacggtgggtaatcgattacaaggcttataaatgaagacagggggctaagatggtctctggtaatcgatta

SEQ ID NO: 304662 - DNA, 385 bp, Glycine max
  unsure (1)..(385): unsure at all n locations
agcttgattttcttgccgctgccccacaaagctgcacgcgaattgtctcggccatgctcttccttgcgagccctctcggcttctcgttcaacggctcttgcggtagctgcattctcttctcgtaactcagcacactctttccggacatctgtagcaactaactcgaatgtttctctggcgagtctatcctttcctagctctgttnttagagctcacactttttcatcctcttccggagcttccaagttctactcgttgataattttcaacttggagagccaatctagacctcccgtatgaactttcacccattcatgataaccatcgatgatgccattacngactgccctacagtctttatcttttcttaaccggctttccactc

SEQ ID NO: 304663 - DNA, 360 bp, Glycine max
  unsure (1)..(360): unsure at all n locations
ctcttaaggtcatcccaccggaaaatagacctaggagcaacgtagtatagccaatctnttgccactccctccagagaatgaggaaaagcctttagaaagatatgatcttcttggacatcagggggcttcatggtgaaacaaacaatatggaactccttaagatgcttataaggatcttcacctacaagatcatgaaacttgtgcagcaaatgtattagtncagtcttgagaacatatggaacaccctcattaggatattgaatgcacaagctttcataagtgaaatcaggtgcagccatctctctaagagtcctctcacgaggtggaggttgagccatgttctcagtataaaaattagta

SEQ ID NO: 304664 - DNA, 258 bp, Glycine max
  unsure (1)..(258): unsure at all n locations
gagtggtacctggagatatgtcgcggcggtcaggagaccttgggaacgtcaggcggggtgctattgcccaaaaccaagcttgaccaatcccgacccaacccgggcatagtccgtcagtgagaacctgtgatgtacctaagcangcgagctcctggcagtcaacacataaaaggaacaaagaccacaaagcaatgaggcttgtggtggctggccacctgtgaaacttgattgatatgtgagatatggtctctggtaatc

SEQ ID NO: 304665 - DNA, 332 bp, Glycine max
  unsure (1)..(332): unsure at all n locations
caatttcgaacgccncgacatattactggactcaatcgaacatcaaagtaaaaatttattgtcgctagaatttgcttatagctactattttcaataagagcgtctcgctatattaccggtctccatcggacatccgtgtaaaaaattattgtcgctcgaaattgcaacgagcttacatnttcaatttcgagcggctcgatatattacgggactcaatcggacatccgagtaaaaaattattgtcgcctgaatatgctacgagcttccgatctcaatatggagcgtctcaatatattacgggactctattggacattcgagtaaaaagttatt

SEQ ID NO: 304666 - DNA, 428 bp, Glycine max
  unsure (1)..(428): unsure at all n locations
agctcgcacccggtgatctctanacccacctgccgcatgcagcttcttatttaattnccattgtntcgatcattaccggactccatcgaacatcctagtaaaaatttattgtccgccgaacttgcttagagcttctattctccatacagagcgtctcgctatattacgggtctccatcggacatccgtgtcaaaaactattgtcgctggaattcgcaacgagcttacatctttaatttcaagcgtntcgatatattaccggactcaatcggacatccgactaaaaaattctcgtcgtctgaatttgctacgagcttccgttttcaattcggagccgcctcctatattaccggactctatcggcattcgagtaaaagttattgtccgttgaatatgctcagagcttcaattctcaatttcgagcatctc

SEQ ID NO: 304667 - DNA, 165 bp, Glycine max
  unsure (1)..(165): unsure at all n locations
gaaggaacagcggtagtcaaagctcaccgttgaaaccagaatgtgaatgaagcccatcctgccacataagcacgagctttataagcgccggtctggnggacgaacgtcaagtggtctcgatataccaagatgatgtctcgagtacattggatctggtacgaccat

SEQ ID NO: 304668 - DNA, 338 bp, Glycine max
  unsure (1)..(338): unsure at all n locations
gagagagaaaggtccaagttccatagagnttgagagattctgctgtgtgaagagctgtagagaaccgagcttgaagaggaagtcgtcctgagaacttaagatgagttcgtgagtgattgtgatgttctagaggtggaggagacatcccgcccacttgtatttcttcaagccttcatctatctcttctctttgttgtaaaagaagcttcccagttatggaaagctcaatcctctgttggttcttccttgtaggtactcgatgtaaatacctgtatatttcattaatgatgcttcgtgtgtgcaccgtgctctcacaacattattcttccgtgcttttgc

SEQ ID NO: 304669 - DNA, 386 bp, Glycine max
  unsure (1)..(386): unsure at all n locations
agctttttttgtctatggttttctagagagagaaaggtccaagttccagagagtttgagagattntgctgtgtgaagagctgtagagaaccgagcttgaagaggaagtcgtcctgagaacttaagatgagtttgtgagtgattgtgatgttctacacgtggaggagacactcccaccacttgtatgtcttcaatccttcatctttctcttctctttgttgtaaaggaagctttccacctatggaaagctaaatcctctgttggttcttccttgtaggtacttgatgtcaatacctgtctatntatttaatgatgttccgtgtgttcactgtgctatcacaacttcattctaccatgctcttgcgttgatcacgtagatgcatgtgt

SEQ ID NO: 304670 - DNA, 394 bp, Glycine max
  unsure (1)..(394): unsure at all n locations
tcaatcgaacaatcagagtaaaacatttattcgtccgntacgaatttgcttagagcttctattttcaataagagcgtctcgctatattacgggtctccatcggacatccgtgtaaaaaattatcgtcgcttgaattcgcaacgagcttacattttcaatttcgagcgtctcgatatattacgggactcaatcggacatccgagtaaaacattattgtcgtctgaatttgctacgagcttccgttttcaatttggagcgtctcaatatattacgggactctattggacattcgagtaacaagttattgtcgtntgaatatgctcacagcttcaattntcaatntccagcattctcatatattacggaactcaatcggacatccgtgtaaaaatta

SEQ ID NO: 304671 - DNA, 284 bp, Glycine max
  unsure (1)..(284): unsure at all n locations
agcgtgttatttcttttcttantaatganggcccgagtcatgttggggaacggttactaaccctgaaggggtttangcaaagacaactgcggcataactagcctgataaatgccaaaggaaatcgtgggaagtatgaggtacgctatnagcccactcacgcagatataaagagaatcatctcgggaaggaagagcggtagtcaaagctcacggctgagacaagaatgtgaacgaagcccaccctgccacataagcaggagctttataagcgcgggtctggggga

SEQ ID NO: 304672 - DNA, 373 bp, Glycine max
  unsure (1)..(373): unsure at all n locations
agctttctttattgaagtcangtgcagccatctccgtaagaagtctctnacgaggcggaggttgagccatgttctcagtatgaaaattagcagtcgaatgctcaaaatcagaatgttcagaatcaccagcaacaaaatgctcacaatgcacagaataatcacgatgcacactatgcctaactaatctatganaggttctatctatttcaacatcaaaggattgtaaatcacctggattgcccctagtcatgcactatatggagcaatcatgtatttctcaaacaagcaccacgggtaaaaagggggtaaaaagaacaaaggtcaaactacgggtaaaactagaactatactcaaacaatattcaaatgagctg

SEQ ID NO: 304673 - DNA, 443 bp, Glycine max
  unsure (1)..(443): unsure at all n locations
agcttgattgtgtgtaacccaccttttccataatagaacacagttaatatgtctactaccattgtgataatctctttctctatcattgagagaaacacttgggttgccaggtccctccacctttgggcgtactctctgaaagatccgtgccccttctttgcacatatcttgtagttgcatcctatccgaagtcattatactgacaccgcctaatgaaggcaaccattaggtccttccaagaatggactcgggaaggttccaagctagtgtaccangtaacagctaccccagtaagactttcttggaaggaatgtataagcaatttctcatcttttgcgtatgcncccatcttccgacaatacgtctttagatggttcttgtngaaagtagtcccctcgtacttgtcaaagtccaacaccttgaactcgggagggctgatgata

SEQ ID NO: 304674 - DNA, 362 bp, Glycine max
ccgtttttttgccttctcttgcaatcgattaatcacacattcgaatatctaactcatgacaatttagagacttacatctatatcgaatcttcaattgctaacgatataccgcacaatatcctttatttaaacaaaacggactcctgttacttaccatgccattttttaaacctcattcgacaagacacactacgatacatactaaagacgctctaatctttctcctcaactaccatctaaattgtacttctacacaatctgtgttacatgacacttaactccaccttgcactatctgcatggcgccacgtgatatatacgctggactctactctccaactcacggtgaattatctcacttcc

SEQ ID NO: 304675 - DNA, 360 bp, Glycine max
gctttctcaacaggccattttgagaagctagatgcttatctatccacacgcctctattaactaacttaactttcctaaaaataactacggatgagtatgacgcaacacataatccaacagtcaacataattgctcataatatatagatatatatatcagggagttacacccctcgccgcagatctctcggaccactcctccctctacattctcgccatttgcaatgcctacctcgccaccgatgaccactgaaaaaagatgatggagttcataaaccaagaacggggtgaattggcttctacattaaactacacttagaaaaatagcttagaatgttgtcctttacaagaatcttatcac

SEQ ID NO: 304676 - DNA, 310 bp, Glycine max
  unsure (1)..(310): unsure at all n locations
cctcgagaagcttcctcgtggcttctttgagaagctctctcaacacgcttctttgagaagttagatccttatctatccacactcctctattaactaaattaacttccttaaaaataattacggatgaaaataatgcagcaaataactcaacatcaaacataattactaataatatatagatatatatatcagggtgttacacccctcgccgcggatctctcggaccactgctccctctacattctcgccatctgcaatgcctacctcgccaccgatgaccactganaaaagatgatggaactcatatacc

SEQ ID NO: 304677 - DNA, 290 bp, Glycine max
  unsure (1)..(290): unsure at all n locations
tgactcactaacctagaattaaaataacttaatgccatttacctanggaattaaaaaaaaaacttaatggctgagtgtaactgaaatagtggcaaccaaaagtcacccccaacagccaacaagtcagccaccatttggtctccccagaggctaatgcctanggttgccaatgggcccttattacaacttgaactaaacctactaaagcctctttagttgattaacccacaacatattttggtcagcccactttacaaggattgggccattatttagacaaactaaacact

SEQ ID NO: 304678 - DNA, 313 bp, Glycine max
  unsure (1)..(313): unsure at all n locations
caagcttatttttatttttttnatgacncacnaacctagaattaaaataacttaatgccattaacctacggaattaaaaaaaaaacttaatggctgagtgtaactgaaatagtggcaaccaaaaatcacccccaacagccaacaagtcagccaccatttggtcttccagagggctaatgcctatgttgcaatttggccctttatacaactttgactaaacctactaaagcctttttagttgattaacccanaacatatttttggtcagccaactttacaaggattgggccattatttagacaaactaaacact

SEQ ID NO: 304679 - DNA, 369 bp, Glycine max
gcatgaaccacaaatgcaagtgactaatacttgtaatcttgtaaagttagtgaaactggcgatttatcaaaaactaaacatagtttcaatgaacgagacaaattagtataaaatctccaatgtttgatctttattgccatttgcttttaacattatattagtctgagtgaaattggagtatatctcacaaataagctcttggatttatattttatgaatgacaaaacagatatggctaacaggaaatactatattaaaagctattaatcaaacttttcaattcaaacttatcattatgtaaatgagttatgatcatttgaacctcataaacatggtcaacaaattgtatgttctatgttattggtccca

SEQ ID NO: 304680 - DNA, 324 bp, Glycine max
  unsure (1)..(324): unsure at all n locations
agcttctatctaaatagactcaccttgaatgaattcctgtgatagcccttgcgagccttgattccctttcagtgttatgaagctcactacaagccttaagagataaaccatgatatcaccatatccttaaagagatatggagctatggaactgctttgagaataagtatggnggggttatgtttcattggacaacttgtattgttggctatgctacatgatgtatattgggccatacttgatgtacatcgtatattggttaatcttggacatgctgaatgaaatgttgtttcttaaaggccatacagtgaaaaaaaaacatatt

SEQ ID NO: 304681 - DNA, 369 bp, Glycine max
  unsure (1)..(369): unsure at all n locations
aaactttctatgagtgttttgaagctcactacaagccttatgtgacaaaccatgatatcaccatatccttaatgaattttggagctctggaattgttatgggaataagtatggtgggtttttgttacattggacaactcgntntgttggctatgcttcatgatgtattatgggccatacttgatgtacattgtatataggttaacatttggacatgctgaatgaaatgttgtttctcacaggccatagagtaaaaatacaaaaatattctataaacaaaaaatcgaacaaagaagaaaaaagcaataaagtcgagtgaataagatcttaaatggcacaagaatgatgaaactctcggttctactcttca

SEQ ID NO: 304682 - DNA, 440 bp, Glycine max
  unsure (1)..(440): unsure at all n locations
agctgcgtgtctaatttatttaccttgaantaanaccgttgatagcccttttgagccttgtttccctttcacgggtttgaagctcactacaagccttaagtgaaaaaccatgatatcaccatatccttaaggaatattggagctttggaattgttttgggaataagtatggcgggtttctgtttcattggacaacttgttttgttggctatgcttcatgatgtattttgggccatacttgatgtacattgtatattggttaaattttggacatgctgaattgaaatgtgtttctcaaacgccatagagtaaaaaaaaaaaaatattcgacaacaaacaatcgacaaagaagacgaaagccataagttgagtgaatagatcttaatggacaagaatatgaaactttggtctactcttatgttaagtttatcctactttttt

SEQ ID NO: 304683 - DNA, 380 bp, Glycine max
  unsure (1)..(380): unsure at all n locations
aaaaaaaacttaatggctgagtgtaactgaaatagtggcaaccaaaagtcacccncaacagccaacaagtcagccaccatttggtctcccagagggctaatgcctangttgccaattgggcccttattacaactcgaactaaacctactaaagcctctntagttgattaacccaaaacatatnnttggtcagccaactntacaaggattgggccattatttagacaaactaaacactctaaaattgagacaaagtggtgccatctagtcctcctncatctgngccatgatacaactcacaaccttggactttntcgcttgaacttggcttgtattcaatagtatggacatactttgtgagagcttcttggcttttcttgt

SEQ ID NO: 304684 - DNA, 278 bp, Glycine max
  unsure (1)..(278): unsure at all n locations
acaagggngaaacttcctgactttattcgttgaccacacagcggtacctggagatatgtcgcggaggtcaagagaccttggggacgtccggtggtgtgctatagcccaaaaccaagcttgaccaatcccgacccaacccgggcatagtctgtcagtgagaacctgtgatgtacctaagcatgcgagctcctggcagtcaacagataaaaggcacaaagaccactcatcaaagaggctctgggtggctggccagctgtcaatcttgtgtgatatatggg

SEQ ID NO: 304685 - DNA, 363 bp, Glycine max
ttcgttgaccacagagtggtacctggagatatgtcgcgggggtcaggagaccttgtggacgtcaggtggggtgctattgcccaaaaccaagcttgaccaatcccgacccaacccgggcatagtcggtcagtgagaacctgtgatgtacctaagcaggcgagctcctggcagtcaacagataaaaggaacaaagaccacaaagcaaggaggcttgtggtggctggccagctgtgaatcttgtgtgatatatgggttatggcctctggtaatcgattaccaagggtgggtaatcgattacaacgcttaacaatgaagacagaaggctaagatggtctctggtcatcgataccaacgggtgtaatc

SEQ ID NO: 304686 - DNA, 316 bp, Glycine max
  unsure (1)..(316): unsure at all n locations
agcttcatttataggcttcctctagaagcttcctcgtggctcttttgagaagctctctcaacacgcttctttgagaagtcagatccttatctatccacacgcctctattaactaaattaactatcttaaaaataattaccgatgaaaataatgcaacacataatcaaacatccgacataattactaataatatatagatatatatatcagggcgttacaccnctcgccgcggatctctcggaccactccctcctttgcattctcgccatctccaatgcctacctcgccaccgatgaccactgaanaaagatgatgg

SEQ ID NO: 304687 - DNA, 268 bp, Glycine max
tttgggcaagattggatgaggggaagtgatgcaatcctactccgcaagggcattgtgtagaagactccaagtagatcgtgctagagatccaacgaaaggccctacggttcttatgagccttacggtagacttcgagcccatgggctaagtatgagcccgcttatctttgtaaatattagaatacgtatctccttcctctgggccttgtattctggccattctagtactataggggtttagccttgtatctcgcggcattttaagtagt

SEQ ID NO: 304688 - DNA, 257 bp, Glycine max
tgatcgtgtcgaaaagaaatcacatgtccgtcatcatccaaaagggggagaatgtgaatgtatgtatacatgattctgatgatgtcacacaagaatctaacaaggctccttcatatgataagcatttgcttcaagaataattcaagattgcttcaacatacaaagccttgtctcaagattcactaaagaccacagcctgcctacaacaaagtgctttcaagacatgcaaggctctggtgatcgactaccaagaagtg

SEQ ID NO: 304689 - DNA, 181 bp, Glycine max
  unsure (1)..(181): unsure at all n locations
ctttctaacacgcttctttgagaagttagatccttatctatccacacncctctattactaaattaacttccttaagaataattacggatgaaaataatgcaacaaattatcaaacattcaacataactactaataatatatacatatatatatcagggtgctacacccctcgccgcggatc

SEQ ID NO: 304690 - DNA, 370 bp, Glycine max
  unsure (1)..(370): unsure at all n locations
tatttcaaaaaggaagtcatatctaatcaaggtctgagagaccatacaagtntcctaacgatttcttattatgtgggccattaagtctatcatatgctgacaatagcccgaaagcccatgaatctcttccggggcggagtacgtgtctgccattcgcttggccttggctaacaatcggggaagttcttgactcccattcaaggtaagagcaaaccgaaccatccacattggtgcctcttggtgtaagagtcgacacccttcctctacctctttttccgcgtatacttggcatattcgtccgcatctatgctcggggccgggcttacctactctttttgcatgatactagcatgtgcttcgctccataacc

SEQ ID NO: 304691 - DNA, 437 bp, Glycine max
  unsure (1)..(437): unsure at all n locations
acgcttntgtagtataaacatgggaccaactcattntatttcaaaaaggaagtcatatctagtcaaggtctgagagaccatacaagtttcctaacgatttctaattatgtgggccattaagtctatcatatgctgacaatagccgagaagcccatgaatctcttccggggcggagtacgtgtctgccatcgctttggccttggctaacaatcggggaagttcttgacttccattcaaggtaagagcaaaccgatccatccacatggttgcctcttggtgtaaagagtcgatcacccttcctctagcctctttntccgcgtatacttgggcatattcgtccgcaatcctatgctcgtgggccgtggctagacctaactcttctttgcgatgatagctagcatgttggtctccgtctcgcataaacgctgagacaagct

SEQ ID NO: 304692 - DNA, 385 bp, Glycine max
  unsure (1)..(385): unsure at all n locations
aaacatgggaccaactcattttatttcaaaaaggaagtcatatctagtcaaggtctgagagaccatacaagtttcctaacgatttctaattatgtgggccattaagtctatcatatgctgacaatagccgagaagcccatgaatctcttcgggggcggagtaggtgtcttgcatcgctttggccttggctaacaatcggcgaagttcttgactcccattcaaggtaagagcacaccgatccatcacatggctgcctctcggtgtaaagagtcgatcacccttcctctagcctctttntncgcgtatacttgggcatattcgtccgcaatcctatgctcatgggccgtggctaaacctaactcttctttgcgatgatagctagcat

SEQ ID NO: 304693 - DNA, 338 bp, Glycine max
  unsure (1)..(338): unsure at all n locations
agagagtttgagagattttgctgtgtgaagagctgtagagaaccgagcttgaagaggaagtcgtcctgagaacttaagatgagtttgtgagtgattgtgatgttctagaggtggaggagacatccncaccacttgtatttcttcaatgcttcatctttctcttctctctgtctgaaaggaagctccccagttatggaaagctacatcctctgtcggttcttncttgtacgtactcgatgtaaatacctgtatatctatctaatgatgctttgcgtgctcactgcgctatcacaacctcattctaccctgctcttcgcctgatcacgtacatgcatgtg

SEQ ID NO: 304694 - DNA, 267 bp, Glycine max
  unsure (1)..(267): unsure at all n locations
tggacttaccctgaattaattcctgttgataatcacttttgagccttggttccctttccttgttgtgaagctcactacaagccttaagtgaaaaaccatgatattaccatatccttaaggaattctggagctctggaattgtttcgngaataagtgtggcgggtttttgtctcattggacaacttgtctttgttggctatgcttcatgacgtattttgggccatacttgatgtacattgcatattggctaaatgttgcacatgctga

SEQ ID NO: 304695 - DNA, 226 bp, Glycine max
aaaacattgagttgatgactatcttcgtacttataaacttggtgtacgtgattcttccttcaccatctaaagtgtttttttcttctttaacaatattagcaccacttatcttgccactatttttatctttgatgctccgaactaaacttgtaacccatagactttcactgtgtacatgtaaaaatctgctctaattaactctttctcaatcactatatatgttact

SEQ ID NO: 304696 - DNA, 407 bp, Glycine max
  unsure (1)..(407): unsure at all n locations
ctctagaagcttcctcgaggcttctttgagaagctttctcacaggcttctttgagaagatagatccttatctatccacacccctctattaactaaattaacttccttaaaaataattacggatgaaaataatgcaacacattatcaaacatcanacattattactaataatatatagatatatatatcagggtggtacacccctcgccgcggatctctcggaccactccttcctctgcattctcgccatgctcaatgcctacctcgccaccgatgaccactgaagatagatgatggaattcactaaccaagaacgggcgaattggcttctaataaataaacttacaaatagtgaaaatttttctttcaagatctttcccaacttttgataacattatgaatgaatac

SEQ ID NO: 304697 - DNA, 306 bp, Glycine max
  unsure (1)..(306): unsure at all n locations
tctagaagcttcctcgtggcttctttgagaagctttctcaacacgcttctttgagaagttagatccttatctatccacacccctctattaactaaattaacttccttaaaaataattacggatgaaaataatgcaacaaataatcaaacattcaacataattactaataatatatagatatatatatcacggtgttacacccctcgccgcggatctctcggaccactccttcctctncattctcgccatctccaatgcctacctcgccaccgatgaccactgaaaaaagatgatggaattcataaa

SEQ ID NO: 304698 - DNA, 323 bp, Glycine max
  unsure (1)..(323): unsure at all n locations
agcttgcttgnggggcttatatggaggctcttctattagctccaacgggggcctttaatggtgattttccaccatggagatgcagcggaagacaaaggaaaggaggtgagaggaggcgccatccattaaggaataagccatggaagaaggagctttaccaccaagatgagccttggataagaagcttggagaggatgcttcaatggaggaaaagacagagggagagaaagagggagggggagcacgaaattgaaggaagaaaaagggagagaagttgaactttgagttgtgcctacaagactctcattcatcaaagttacaac

SEQ ID NO: 304699 - DNA, 431 bp, Glycine max
agcttctctgagaaaacgaggtgagaagcttgtatctcagctacacacacccctctcataactaagttcacctccttgagaagcttccttaagaagattcctacagatgctatagcttagctacacatactgatgcaagctccattggagcttgcaggcctaagatcttcttcaccaacggactcctttgctttttgaaagataaatggcagcggaatggaaaacgaagagagataggacacgccaccttaacgagaacattattctacaagaagctcaccaccatacgaggccatggataacagcttggaggaagaatgacatgaatgaacggagagagatagaatagctcgaaattcgtgctcaaaggagctctgaatctgaagtactattcaatgatcaagttacaaaatcccacactgacctctatt

SEQ ID NO: 304700 - DNA, 456 bp, Glycine max
  unsure (1)..(456): unsure at all n locations
atgcaagcttctccactaagtatcctgatgctaatangtcctctctgatggcagnggtcctatatgcagggaagaatgtctccaaaaacaccctcttaaggtcatcccagctgaaaatagacctgcgagcaaggtattacaaccaatcttttgcactccctccagagaatgaggaaaagcctttaaaaagatatgatcttcttggacatcagggggcttcatggtggaacaaacaatatggaactccttaaaatgtntatgaggatattcacctgcaagaccacgaaacttgggcagcaaatgtattagtccagtcttgagaacatatggaacaccctcatcacgatattgaatgcacaaactttcataagtgaaattatgtgcacccatcttcctaagagctctttcacgaggtgcgaggtgagccatggtctcacataaaattaatagtgaatg

SEQ ID NO: 304701 - DNA, 235 bp, Glycine max
tcagcagcaaaatcaaccacagcagagcaaatatgacctccccagcacagaaacaaccctggatggacgaaacaccctaacctcacatggccagccctcagcaacaacaacagcagcctgctccttccttacaaaatgctgctggcccaagcagaccatacaatcctccaccaatccacacacagcaccaaccccagaaacaaccaacagtcgaggcccctccacaaccttcccc
